(19) United States
(12) Patent Application Publication
(10) Pub. No.: US 2013/0316343 A1
(43) Pub. Date: Nov. 28, 2013

(54) DELTA3, FTHMA-070, TANGO85, TANGO77, SPOIL, NEOKINE, TANGO129, AND INTEGRIN ALPHA SUBUNIT PROTEIN AND NUCLEIC ACID MOLECULES AND USES THEREOF

(71) Applicant: Millenium: The Takeda Oncology Company, Cambridge, MA (US)

(72) Inventors: Sean A. McCarthy, San Diego, CA (US); David P. Gearing, Camberwell (AU)

(73) Assignee: Millenium: The Takeda Oncology Company, Cambridge, MA (US)

(21) Appl. No.: 13/866,501

(22) Filed: Apr. 19, 2013

Related U.S. Application Data
(63) Continuation of application No. 12/984,939, filed on Jan. 5, 2011, now abandoned.
Application No. 12/984,939 is a continuation of application No. 11/974,478, filed on Oct. 12, 2007, now Pat. No. 7,897,725.
Application No. 11/974,478 is a continuation of application No. 11/175,714, filed on Jul. 5, 2005, now abandoned.
Application No. 11/175,714 is a continuation-in-part of application No. 10/095,407, filed on Mar. 11, 2002, now abandoned.
Application No. 10/095,407 is a continuation of application No. 09/451,828, filed on Nov. 30, 1999, now abandoned.
Application No. 09/451,828 is a division of application No. 09/128,155, filed on Aug. 3, 1998, now Pat. No. 6,117,654.
Application No. 11/175,714 is a continuation-in-part of application No. 10/105,150, filed on Mar. 25, 2002, now abandoned.
Application No. 10/105,150 is a continuation of application No. 10/060,680, filed on Jan. 30, 2002, now abandoned.
Application No. 10/060,680 is a continuation of application No. 09/057,951, filed on Apr. 9, 1998, now abandoned.
Application No. 11/175,714 is a continuation-in-part of application No. 10/126,560, filed on Apr. 19, 2002, now abandoned.
Application No. 10/126,560 is a continuation-in-part of application No. 09/237,571, filed on Jan. 26, 1999, now abandoned.
Application No. 09/237,571 is a continuation-in-part of application No. 09/013,810, filed on Jan. 27, 1998, now Pat. No. 6,197,551.
Application No. 11/175,714 is a continuation-in-part of application No. 10/413,899, filed on Apr. 14, 2003, now abandoned.
Application No. 10/413,899 is a division of application No. 09/940,240, filed on Aug. 27, 2001, now abandoned.
Application No. 09/940,240 is a continuation of application No. 09/248,239, filed on Feb. 10, 1999, now abandoned.
Application No. 09/248,239 is a continuation-in-part of application No. 09/023,664, filed on Feb. 10, 1998, now abandoned.
Application No. 11/175,714 is a continuation-in-part of application No. 10/417,719, filed on Apr. 17, 2003, now abandoned.
Application No. 10/417,719 is a continuation of application No. 09/568,218, filed on May 9, 2000, now abandoned.
Application No. 09/568,218 is a continuation-in-part of application No. 08/872,855, filed on Jun. 11, 1997, now Pat. No. 6,121,045.
Application No. 08/872,855 is a continuation-in-part of application No. 08/832,633, filed on Apr. 4, 1997, now abandoned.
Application No. 11/175,714 is a continuation-in-part of application No. 10/601,368, filed on Jun. 23, 2003, now abandoned.
Application No. 10/601,368 is a continuation of application No. 09/572,003, filed on May 15, 2000, now abandoned.
Application No. 09/572,003 is a continuation-in-part of application No. 09/322,790, filed on May 28, 1999, now abandoned.
Application No. 09/322,790 is a continuation-in-part of application No. 09/561,263, filed on Apr. 27, 2000, now abandoned.
Application No. 11/175,714 is a continuation-in-part of application No. 10/895,676, filed on Jul. 21, 2004, now abandoned.
Application No. 10/895,676 is a continuation of application No. 10/105,934, filed on Mar. 25, 2002, now abandoned.
Application No. 10/105,934 is a continuation of application No. 09/862,972, filed on May 22, 2001, now abandoned.
Application No. 09/862,972 is a continuation of application No. 09/062,389, filed on Apr. 17, 1998, now abandoned.
(60) Provisional application No. 60/091,650, filed on Jul. 2, 1998.
(60) Provisional application No. 60/054,646, filed on Aug. 4, 1997.
(60) Provisional application No. 60/062,017, filed on Oct. 10, 1997.
(60) Provisional application No. 60/044,746, filed on Apr. 18, 1997.

(51) Int. Cl. C12Q 1/48; C12Q 1/68

(52) U.S. Cl. CPC C12Q 1/48; C12Q 1/6876
USPC 435/6.11; 536/23.5; 435/325; 530/350; 436/501; 530/387.9; 530/387.3; 530/391.3; 435/188; 435/320.1

(57) ABSTRACT

The invention provides novel Delta3, FTHMA-070, Tango85, Tango77, SPOIL, NEOKINE, Tango129 and A259 polypeptides, proteins, and nucleic acid molecules. In addition to isolated, full-length Delta3, FTHMA-070, Tango85, Tango77, SPOIL, NEOKINE, Tango129 and A259 proteins, the invention further provides isolated Delta3, FTHMA-070, Tango85, Tango77, SPOIL, NEOKINE, Tango129 and A259 fusion proteins, antigenic peptides and anti-Delta3, FTHMA-070, Tango85, Tango77, SPOIL, NEOKINE, Tango129 and A259 antibodies. The invention also provides Delta3, FTHMA-070, Tango85, Tango77, SPOIL, NEOKINE, Tango129 and A259 nucleic acid molecules, recombinant expression vectors containing a nucleic acid molecule of the invention, host cells into which the expression vectors have been introduced and non-human transgenic animals in which a Delta3, FTHMA-070, Tango85, Tango77, SPOIL, NEOKINE, Tango129 or A259 gene has been introduced or disrupted. Diagnostic, screening and therapeutic methods utilizing compositions of the invention are also provided.

### CROSS REFERENCE TO RELATED APPLICATIONS

[0001] This application is a continuation of U.S. patent application Ser. No. 11/175,714, filed Jul. 5, 2005, pending.

[0002] U.S. patent application Ser. No. 11/175,714, filed Jul. 5, 2005, is a continuation-in-part of U.S. patent application Ser. No. 10/417,719, filed Apr. 17, 2003, now abandoned, which is a continuation of U.S. patent application Ser. No. 09/568,218, filed May 9, 2000, now abandoned, which is a continuation-in-part of U.S. Pat. No. 8,872,855, filed Jun. 11, 1997, now U.S. Pat. No. 6,121,045, which is a continuation-in-part of U.S. Pat. No. 8,832,633, filed Apr. 4, 1997, now abandoned.

[0003] U.S. patent application Ser. No. 11/175,714, filed Jul. 5, 2005, is also a continuation-in-part of U.S. patent application Ser. No. 10/895,676, filed Jul. 21, 2004, now abandoned, which is a continuation of U.S. patent application Ser. No. 10/105,934, filed Mar. 25, 2002, now abandoned, which is a continuation of U.S. patent application Ser. No. 09/862,972, filed May 22, 2001, now abandoned, which is a continuation of U.S. patent application Ser. No. 09/062,389, filed Apr. 17, 1998, now abandoned, which claims the benefit of Provisional Application Ser. No. 60/062,017, filed Oct. 10, 1997, now abandoned, and Provisional Application Ser. No. 60/044,746, filed Apr. 18, 1997, now abandoned.

[0004] U.S. patent application Ser. No. 11/175,714, filed Jul. 5, 2005, is also a continuation-in-part of U.S. patent application Ser. No. 10/095,407, filed Mar. 11, 2002, now abandoned, which is a continuation of U.S. patent application Ser. No. 09/451,828, filed Nov. 30, 1999, now abandoned, which is a divisional of U.S. patent application Ser. No. 09/128,155, filed Aug. 3, 1998, now U.S. Pat. No. 6,117,654, which claims the benefit of Provisional Application Ser. No. 60/091,650, filed Jul. 2, 1998, now abandoned, and Provisional Application Ser. No. 60/054,646, filed Aug. 4, 1997, now abandoned.

[0005] U.S. patent application Ser. No. 11/175,714, filed Jul. 5, 2005, is also a continuation-in-part of U.S. patent application Ser. No. 10/126,560, filed Apr. 19, 2002, now abandoned, which is a continuation-in-part of U.S. patent application Ser. No. 09/237,571, filed Jan. 26, 1999, now abandoned, which is a continuation-in-part of U.S. patent application Ser. No. 09/013,810, filed Jan. 27, 1998, now U.S. Pat. No. 6,197,551.

[0006] U.S. patent application Ser. No. 11/175,714, filed Jul. 5, 2005, is also a continuation-in-part of U.S. patent application Ser. No. 10/413,899, filed Apr. 14, 2003, now abandoned, which is a divisional of U.S. patent application Ser. No. 09/940,240, filed Aug. 27, 2001, now abandoned, which is a continuation of U.S. patent application Ser. No. 09/248,239, filed Feb. 10, 1999, now abandoned, which is a continuation-in-part of U.S. patent application Ser. No. 09/023,664, filed Feb. 10, 1998, now abandoned.

[0007] U.S. patent application Ser. No. 11/175,714, filed Jul. 5, 2005, is also a continuation-in-part of U.S. patent application Ser. No. 10/105,150, filed Mar. 25, 2002, now abandoned, which is a continuation of U.S. patent application Ser. No. 10/060,680, filed Jan. 30, 2002, now abandoned, which is a continuation of U.S. patent application Ser. No. 09/057,951, filed Jan. 8, 2001, now abandoned.

[0008] U.S. patent application Ser. No. 11/175,714, filed Jul. 5, 2005, is also a continuation-in-part of U.S. patent application Ser. No. 10/601,368, filed Jun. 23, 2003, now abandoned, which is a continuation of U.S. patent application Ser. No. 09/572,003, filed May 15, 2000, now abandoned, which is a continuation-in-part of U.S. patent application Ser. No. 09/561,263, filed Apr. 27, 2000, now abandoned, which is a continuation-in-part of U.S. patent application Ser. No. 09/322,790, filed May 28, 1999, now abandoned.

[0009] The entire contents of each of the above-listed patent applications are incorporated herein by reference.

[0010] The contents of the Sequence Listing are submitted herewith on compact disc in duplicate. Each duplicate disc has a copy of the file “sequence listing.txt” which is incorporated herein by this reference. This file is 961 kilobytes and was copied onto compact disc on Oct. 12, 2007.

### BACKGROUND OF THE INVENTION

[0011] There is considerable medical interest in secreted and membrane-associated mammalian proteins. Many such proteins, for example, cytokines, are important for inducing the growth or differentiation of cells with which they interact or for triggering one or more specific cellular responses.

[0012] The demonstrated clinical utility of several secreted proteins in the treatment of human disease, for example, erythropoietin, granulocyte-macrophage colony stimulating factor (GM-CSF), human growth hormone, and various interleukins, illustrates the importance of secreted proteins.

[0013] Many membrane-associated proteins are receptors which bind a ligand(s) and transmit an intracellular signal. As such, membrane-associated proteins can be used to identify (or design) small molecules which act as agonists or antagonists of the ligand.

### SUMMARY OF THE INVENTION

[0014] The present invention is based, at least in part, on the discovery of cDNA molecules which encode the TANGO 24 (DELTA3), FTHMA-070, TANGO 85, TANGO 77, TANGO 80 (SPOIL), TANGO 112 (NEOKINE), TANGO 129 and A259 (INTEGRIN ALPHA SUBUNIT) proteins.

### Delta 3

[0015] The invention is based at least in part on the discovery of a human gene encoding a novel Delta protein, and its mouse homolog, each of which differs substantially from the previously described Delta proteins. Accordingly, the novel Delta proteins of the invention are referred to herein as Delta3 proteins. Thus, the invention provides Delta3 proteins, and nucleic acids encoding Delta3 proteins. An exemplary human Delta3 (hDelta3) is contained in a plasmid which was deposited with the ATCC® on Mar. 5, 1997, and has been assigned ATCC® accession number 98348.

[0016] Based on Northern blot analysis of RNA prepared from a number of human tissues, a 3.5 kb message was expressed in fetal brain, lung, liver and kidney; and adult heart, placenta, lung, skeletal muscle, kidney, pancreas, spleen, thymus, prostate, testis, ovary, small intestine and colon. In addition, the hDelta3 gene was found to be expressed at relatively high levels in at least some tumor cells (e.g., colon carcinoma) and its expression can be up-regulated in response to various growth factors (e.g., bFGF and VEGF). Furthermore, the expression of hDelta3 was also shown to increase in response to a signal-induced differentiation of endothelial cells, indicating a role for hDelta3 in modulating the growth and/or differentiation of cells, in particular endothelial cells.

[0017] In situ hybridization of a panel of adult and embryonic tissues using a probe complementary to mRNA of mDelta3 showed that mDelta3 expression was most abundant and widespread during embryogenesis. Strongest expression was observed in the eye during all stages of embryogenesis tested, mDelta3 was also seen in the developing lung, thymus and brown fat. In addition to the focal expression seen above, a multi-focal, scattered pattern was seen throughout the embryo. This signal pattern was more focused in the cortical region of the kidney and outlining the intestinal tract. Adult expression was highest in the ovary and the cortical regions of the kidney and adrenal gland. The expression seen during embryogenesis indicates that Delta3 has a role in cell growth and/or differentiation.

[0018] As demonstrated herein, Delta3 encodes a Notch lignad. In particular, data presented herein demonstrates that hDelta3 encodes a Notch ligand, as it has been shown to block the differentiation of C2C12 into myotubes in a similar fashion to other Notch ligands (e.g., Jagged 1).

[0019] As described herein, the hDelta3 gene has been localized by Southern blotting a membrane containing DNA from a panel of a human/hamster mono-chromosomal somatic cell hybrids. The results demonstrate that human Delta3 is located on human chromosome 15, close to framework markers D15S1244 and D15S144, a chromosomal region that has been associated with the neurological disease Agenesis of the Corpus Callosum with Peripheral Neuropathy (ACCPN) Casaubon et al. (1996) Am J. Hum. Genet. 58:28). Accordingly, polymorphisms in Delta3 are thought to be involved in this neurological disease. As described further herein, Delta3 is also likely to be involved in other neurological diseases as well as in non-neurological diseases.

[0020] In one aspect, the invention features isolated Delta3 nucleic acid molecules, e.g., mammalian, such as human or mouse, Delta3 nucleic acids. The disclosed molecules can be non-coding, (e.g., probe, antisense or ribozyme molecules) or can encode a functional Delta3 polypeptide, e.g., a polypeptide which can modulate at least one activity of a Delta3 polypeptide. In one embodiment, the nucleic acid molecules hybridize to the Delta3 gene contained in the plasmid having American Type Culture Collection (ATCC®) Accession Number 98348. In another embodiment, the claimed nucleic acid is capable of hybridizing under stringent conditions to the nucleotide sequence set forth in SEQ ID NOS: 1, 3, 24, 26, 27, 29, 31, 33, 35, 37, 39, 41, 43 or 45, or the nucleotide sequence of the cDNA of a clone deposited with the ATCC® as Accession Number 98348, or to the complement thereof.

[0021] In further embodiments, the nucleic acid molecule is a Delta3 nucleic acid molecule that is at least about 50%, 55%, 60%, 70%, preferably 80%, more preferably 85%, and even more preferably at least about 95% or 98% identical to the nucleic acids shown in SEQ ID Nos: 1, 3, 24, 26, 27, 29, 31, 33, 35, 37, 39, 41, 43 or 45, or the nucleotide sequence of the cDNA of a clone deposited with the ATCC® as Accession Number 98348, or a complement thereof.

[0022] In another embodiment, the nucleic acid molecule is a Delta3 nucleic acid that is at least about 50%, 55%, 60%, 65%, 70%, preferably 80%, more preferably 85%, and even more preferably at least about 95% or 98% identical to the nucleic acids shown in SEQ ID NOS: 1, 3, 24, 26, 27, 29, 31, 33, 35, 37, 39, 41, 43 or 45, or the nucleotide sequence of the cDNA of a clone deposited with the ATCC® as Accession Number 98348 or a complement thereof, wherein such nucleic acid molecules encode polypeptides or proteins that exhibit at least one structural and/or functional feature of a polypeptide of the invention.

[0023] In another embodiment, the nucleic acid molecule encodes a polypeptide that is at least about 55%, 60%, 70%, preferably 80%, more preferably 85%, and even more preferably at least about 90, 95% or 98% identical to the polypeptide shown in SEQ ID NOS: 2, 25, 28, 30, 32, 34, 36, 38, 40, 42, 44 or 46, or the amino acid sequence encoded by the cDNA of a clone deposited with the ATCC® as Accession Number 98348, or a complement thereof.

[0024] In another embodiment, the nucleic acid molecule encodes a polypeptide that is at least about 55%, 60%, 70%, preferably 80%, more preferably 85%, and even more preferably at least about 90, 95% or 98% identical to the polypeptide shown in SEQ ID NOS: 2, 25, 28, 30, 32, 34, 36, 38, 40, 42, 44 or 46, or the amino acid sequence encoded by the cDNA of a clone deposited with the ATCC® as Accession Number 98348, or a complement thereof, wherein such nucleic acid molecules encode polypeptides or proteins that exhibit at least one structural and/or functional feature of a polypeptide of the invention. In another embodiment, the nucleic acid molecule encodes a polypeptide that is at least about 72%, preferably 80%, more preferably 85%, and even more preferably at least about 90 or 95% similar to the polypeptide shown in SEQ ID NOS: 2, 25, 28, 30, 32, 34, 36, 38, 40, 42, 44 or 46, or the hDelta 3 cDNA sequence contained in the plasmid having ATCC® Accession Number 98348, or a complement thereof.

[0025] In another embodiment, the nucleic acid molecule encodes a polypeptide that is at least about 72%, preferably 80%, more preferably 85%, and even more preferably at least about 90 or 95% similar to the polypeptide shown in SEQ ID NOS: 2, 25, 28, 30, 32, 34, 36, 38, 40, 42, 44 or 46, or the Delta 3 cDNA sequence contained in the plasmid having ATCC® Accession Number 98348, or a complement thereof, wherein such nucleic acid molecules encode polypeptides or proteins that exhibit at least one structural and/or functional feature of a polypeptide of the invention.

[0026] Also within the invention are nucleic acid molecules which encode a fragment of a polypeptide having the amino acid sequence of any of SEQ ID NOS: 2, 25, 28, 30, 32, 34, 36, 38, 40, 42, 44 or 46, the fragment including at least 15 (20, 25, 30, 35, 40, 45, 50, 55, 60, 65, 70, 75, 80, 85, 90, 95, 100, 110, 120, 130, 140, 150, 160, 170, 180, 190, 200, 210, 220, 230, 240, 250, 260, 270, 280, 290, 300, 310, 320, 330, 340, 350, 360, 370, 380, 390, 400, 410, 420, 440, 460, 475, 500, 525, 550, 575, 600, 625, 650, 675, or 685) contiguous amino acids of any of SEQ ID NOS: 2, 25, 28, 30, 32, 34, 36, 38, 40, 42, 44 or 46, or the polypeptide encoded by the cDNA of a clone deposited with the ATCC® as Accession Number 98348.

[0027] Also within the invention are nucleic acid molecules which encode a fragment of a polypeptide having the amino acid sequence of any of SEQ ID NOS: 2, 25, 28, 30, 32, 34, 36, 38, 40, 42, 44 or 46, the fragment including at least 15 (20, 25, 30, 35, 40, 45, 50, 55, 60, 65, 70, 75, 80, 85, 90, 95, 100, 110, 120, 130, 140, 150, 160, 170, 180, 190, 200, 210, 220, 230, 240, 250, 260, 270, 280, 290, 300, 310, 320, 330, 340, 350, 360, 370, 380, 390, 400, 410, 420, 440, 460, 475, 500, 525, 550, 575, 600, 625, 650, 675, or 685) contiguous amino acids of any of SEQ ID NOS: 2, 25, 28, 30, 32, 34, 36, 38, 40, 42, 44 or 46, or the polypeptide encoded by the cDNA of a clone deposited with the ATCC® as Accession Number 98348, wherein the fragment exhibits at least one structural and/or functional feature of a polypeptide of the invention.

[0028] The nucleic acids of the invention can comprise a nucleotide sequence encoding at least one domain or motif of a Delta3 protein, i.e., a domain or motif selected from the group consisting of an amino-terminal signal peptide, a Delta-Serrated lag-2 (DSL) domain, Epidermal Growth Factor (EGF)-like domain 1, EGF-like domain 2, EGF-like domain 3, EGF-like domain 4, EGF-like domain 5, EGF-like domain 6, EGF-like domain 7, EGF-like domain 8, a Delta3 extracellular domain, a transmembrane domain (TM), and a cytoplasmic domain. Other nucleic acids of the invention encode soluble Delta3 proteins, e.g., Delta3 proteins comprising at least a portion, such as one or more domains, of the extracellular domain of a Delta3 protein. A soluble Delta3 protein is a protein that is soluble at standard physiological conditions, and includes, but is not limited to a Delta3 protein that does not comprise a transmembrane domain, e.g., an extracellular Delta3 domain. These soluble polypeptides may or may not comprise a signal peptide. Other such nucleic acids encode soluble fusion proteins comprising Delta3 amino acid sequence and a heterologous amino acid sequence, e.g., an immunoglobulin constant region.

[0029] The invention also provides probes and primers comprising substantially purified oligonucleotides, which correspond to a region of nucleotide sequence which hybridizes to at least about 6 consecutive nucleotides of the sequences set forth as SEQ ID NOs: 1, 3, 24, 26, 27, 29, 31, 33, 35, 37, 39, 41, 43 or 45, or the nucleotide sequence of the cDNA of a clone deposited with the ATCC® as Accession Number 98348, or a complement thereof, or naturally-occurring mutants thereof. In preferred embodiments, the probe/primer further includes a label group attached thereto, which is capable of being detected.

[0030] The invention features nucleic acid molecules of at least 425, 450, 500, 550, 600, 650, 700, 750, 800, 850, 900, 950, 1000, 1100, 1200, 1300, 1400, 1500, 1600, 1700, 1800, 1900, 2000, 2100, 2200, 2300, 2400, 2500, 2600, 2700, or 2800 nucleotides of the nucleotide sequence of SEQ ID NO: 1, the nucleotide sequence of the human Delta3 cDNA clone of ATCC® Accession NO: 98348, or a complement thereof. The invention also features nucleic acid molecules comprising at least 25, 50, 100, 150, 200, 250, 300, 350, 400, 450, 500, 600, 650, 700, 750, 800, 850, 900, 950, 1000, 1050, 1100, 1150, 1200, 1250, 1300, 1350, 1400, 1450, 1500, 1550, 1600, 1650, 1700, 1750, 1800, 1850, 1900, 1950, 2000, 2050 or 2061 nucleotides of nucleic acids 1 to 2062 of SEQ ID NO:1, or a complement thereof, wherein such nucleic acid molecules encode polypeptides or proteins that exhibit at least one structural and/or functional feature of a polypeptide of the invention.

[0031] The invention features nucleic acid molecules which include a fragment of at least 340, 400, 450, 500, 550, 600, 650, 700, 750, 800, 850, 900, 950, 1000, 1050, 1100, 1150, 1200, 1250, 1300, 1350, 1400, 1450, 1450, 1500, 1550, 1600, 1650, 1700, 1750, 1800, 1850, 1900, 1950, 2000, 2050 or 2058 nucleotides of the nucleotide sequence of SEQ ID NO:3, or a complement thereof. The invention also features nucleic acid molecules comprising at least 25, 50, 100, 150, 200, 250, 300, 350, 400, 450, 500, 600, 650, 700, 750, 800, 850, 900, 950, 1000, 1050, 1100, 1150, 1200, 1250, 1300, 1350, 1400, 1450, 1500, 1550, 1600, 1650, 1700, or 1724 nucleotides of nucleic acids 1 to 1725 of SEQ ID NO:3, or a complement thereof.

[0032] The invention features nucleic acid molecules of at least 480, 500, 550, 600, 650, 700, 750, 800, 850, 900, 950, 1000, 1050, 1100, 1150, 1200, 1250, 1300, 1350, 1400, 1450, 1450, 1500, 1550, 1600, 1650, 1700, 1750, 1800, 1850, 1900, 1950, 2000, 2050, 2100, 2200, 2300, 2400, 2500, 2600, 2700, 2800, 2900, 3000, 3100 or 3130 nucleotides of the nucleotide sequence of SEQ ID NO:24, the nucleotide sequence of the mouse Delta3 cDNA, or a complement thereof. The invention also features nucleic acid molecules comprising at least 25, 50, 100, 150, 200, 250, 300, 350, 400, 450, 500, 600, 650, 700, 750, 800, 850, 900, 950, 1000, 1050, 1100, 1150, 1200, 1250, 1300, 1350, 1400, 1450, 1500, or 1529 nucleotides of nucleic acids 1 to 1530 of SEQ ID NO:24, or a complement thereof, wherein such nucleic acid molecules encode polypeptides or proteins that exhibit at least one structural and/or functional feature of a polypeptide of the invention.

[0033] The invention features nucleic acid molecules which include a fragment of at least 415, 450, 500, 550, 600, 650, 700, 750, 800, 850, 900, 950, 1000, 1050, 1100, 1150, 1200, 1250, 1300, 1350, 1400, 1450, 1450, 1500, 1550, 1600, 1650, 1700, 1750, 1800, 1850, 1900, 1950, 2000, 2050, 2100 nucleotides of the nucleotide sequence of SEQ ID NO: 26, or a complement thereof. The invention also features nucleic acid molecules comprising at least 25, 50, 100, 150, 200, 250, 300, 350, 400, 450, 500, 600, 650, 700, 750, 800, 850, 900, 950, 1000, 1050, 1100, 1150, 1200, 1250, 1300, 1350, 1400, 1450, 1500 or 1529 nucleotides of nucleic acids 1 to 1530 of SEQ ID NO: 3, or a complement thereof.

[0034] Another aspect of the invention provides vectors, e.g., recombinant expression vectors, comprising a nucleic acid molecule of the invention. In another embodiment the invention provides host cells containing such a vector. The invention also provides methods for producing a polypeptide of the invention by culturing, in a suitable medium, a host cell of the invention containing a recombinant expression vector encoding a polypeptide of the invention such that the polypeptide of the invention is produced.

[0035] For expression, the subject Delta3 nucleic acids can include a mammalian transcriptional regulatory sequence, e.g., at least one of a transcriptional promoter (e.g., for constitutive expression or inducible expression) or transcriptional enhancer sequence, the regulatory sequence is operably linked to the Delta3 gene sequence. Such regulatory sequences in conjunction with Delta3 nucleic acid molecules can be useful in vectors for gene expression. This invention also describes host cells transfected with said expression vectors whether prokaryotic or eukaryotic, also in vitro (e.g., cell culture) and in vivo (e.g., transgenic) methods for producing Delta3 proteins by employing said expression vectors. In a preferred embodiment, the Delta3 nucleic acids are cloned into a mammalian expression vector, and transfected into mammalian cells. The use of mammalian cells increases the likelihood of proper protein folding and post-translational modification of the expressed proteins.

[0036] The invention also features nucleic acid molecules that hybridize under stringent conditions to a nucleic acid molecule comprising the nucleotide sequence of any of SEQ ID NOS: 1, 3, 24, 26, 27, 29, 31, 33, 35, 37, 39, 41, 43 or 45 of the cDNA of a clone deposited with the ATCC® as Accession Number 98348, or a complement thereof, wherein preferably such nucleic acid molecules encode polypeptides or proteins that exhibit at least one structural and/or functional feature of a polypeptide of the invention. In other embodiments, the nucleic acid molecules are at least 485 (500, 550, 600, 650, 700, 800, 900, 1000, 1100, 1200, 1300, 1400, 1500, 1600, 1700, 1800, 1900, 2000, 2100, 2200, 2300, 2400, 2500, 2600, 2700, or 2800) nucleotides in length and hybridize under stringent conditions to a nucleic acid molecule comprising the nucleotide sequence of any of SEQ ID NOS: 1, 3, 24, 26, 27, 29, 31, 33, 35, 37, 39, 41, 43 or 45 of the cDNA of a clone deposited with the ATCC® as Accession Number 98348, or a complement thereof.

[0037] In preferred embodiments, the isolated nucleic acid molecules encode a cytoplasmic, transmembrane, or extracellular domain of a polypeptide of the invention.

[0038] The invention includes nucleic acid molecules which encode an allelic variant of a polypeptide comprising the amino acid sequence of any of SEQ ID NOS: 2, 25, 28, 30, 32, 34, 36, 38, 40, 42, 44 or 46, or an amino acid sequence encoded by the cDNA of a clone deposited with the ATCC® as Accession Number 98348, or a complement thereof, wherein the nucleic acid molecule hybridizes under stringent conditions to a nucleic acid molecule having a nucleic acid sequence encoding any of SEQ ID NOS:1, 3, 24, 26, 27, 29, 31, 33, 35, 37, 39, 41, 43 or 45, or the nucleotide sequence of the cDNA of a clone deposited with the ATCC® as Accession Number 98348, or a complement thereof.

[0039] The invention includes nucleic acid molecules which encode an allelic variant of a polypeptide comprising the amino acid sequence of any of SEQ ID NOS: 2, 25, 28, 30, 32, 34, 36, 38, 40, 42, 44 or 46, or an amino acid sequence encoded by the cDNA of a clone deposited with the ATCC® as Accession Number 98348, or a complement thereof, wherein the nucleic acid molecule hybridizes under stringent conditions to a nucleic acid molecule having a nucleic acid sequence encoding a polypeptide having any of the amino acid sequences shown in SEQ ID NOS: 2, 25, 28, 30, 32, 34, 36, 38, 40, 42, 44 or 46, or the amino acid sequence encoded by the cDNA of a clone deposited with the ATCC® as Accession Number 98348, or a complement thereof, wherein such nucleic acid molecules encode polypeptides or proteins that exhibit at least one structural and/or functional feature of a polypeptide of the invention.

[0040] In one embodiment of a nucleotide sequence of human Delta3, the nucleotide at position 455 is a guanine (G) (SEQ ID NO: 1). In this embodiment, the amino acid at position 40 is glutamate (E) (SEQ ID NO: 2). In another embodiment of a nucleotide sequence of human Delta3, the nucleotide at position 455 is a cytosine (C) (SEQ ID NO: 27). In this embodiment, the amino acid at position 40 is glutamine (Q) (SEQ ID NO: 28). In another embodiment of a nucleotide sequence of human Delta3, the nucleotide at position 455 is a thymidine (T) (SEQ ID NO: 29). In this embodiment, the amino acid at position 40 is a stop codon (SEQ ID NO: 30). In another embodiment of a nucleotide sequence of human Delta3, the nucleotide at position 455 is a adenine (A) (SEQ ID NO: 31). In this embodiment, the amino acid at position 40 is lysine (K) (SEQ ID NO: 32).

[0041] In another embodiment, the invention provides an isolated nucleic acid molecule which is antisense to the coding strand of a nucleic acid of the invention.

[0042] In another aspect, the invention features isolated Delta3 polypeptides, preferably substantially pure preparations, e.g., of plasma-purified or recombinantly produced Delta3 polypeptides. Preferred proteins and polypeptides possess at least one biological activity of the corresponding naturally-occurring human polypeptide. Such an activity can be a direct activity, such as an association with or an enzymatic activity on a second protein or an indirect activity, such as a cellular signaling activity mediated by interaction of the protein with a second protein. Thus, such activities include, for example, ones related to Delta3's function as a Notch ligand. Delta3 activities include, e.g., (1) the ability to form protein-protein interactions with proteins in the signaling pathway of the naturally-occurring polypeptide; (2) the ability to bind a ligand of the naturally-occurring polypeptide; (3) the ability to bind to an intracellular target of the naturally-occurring polypeptide; (4) the ability to modulate cellular proliferation; (5) the ability to modulate cellular differentiation; (6) the ability to modulate chemotaxis and/or migration; and/or (7) the ability to modulate cell death; (8) maintenance of energy homeostasis (e.g., regulating the balance or imbalance between energy storage and energy expenditure, for example, increasing or decreasing energy expenditure; (9) regulation of adaptive thermogenesis (e.g., regulation of the biogenesis of mitochondria, regulation of the expression of mitochondrial enzymes, regulation of expression of uncoupling proteins; (10) regulation of adiposity; (11) modulation of the efficiency of energy storage; (12) regulation of appetite; (13) expansion/reduction of fat mass; (14) regulation of vasculogenesis (blood vessel formation); (15) regulation of tumor angiogenesis; (16) regulation of wound healing; (17) expansion/reduction of tumor mass; (18) the ability to modulate development, differentiation, proliferation and/or activity of immune cells (e.g., leukocytes and macrophages), endothelial cells and smooth muscle cells; (19) the ability to modulate the host immune response; (20) the ability to modulate the development of organs, tissues and/or cells of the embryo and/or fetus; (21) the ability to modulate cell-cell interactions and/or cell-extracellular matrix interactions; (22) the ability to modulate atherosclerosis, e.g., the initiation and progression of atherosclerosis; (23) the ability to modulate atherogenesis; (24) the ability to modulate inflammatory functions e.g., by modulating leukocyte adhesion to extracellular matrix and/or endothelial cells; (25) the ability to form, e.g., stabilize, promote, facilitate, inhibit, or disrupt, cell to cell and cell to blood product interaction, e.g., between leukocytes and platelets or leukocytes and vascular endothelial cells; (26) ability to modulate development, differentiation and activity of skeletal muscle cells and tissue; and (27) ability to act in stem cell preservation.

[0043] In certain embodiments, the subject polypeptides are capable of modulating an activity of a Delta3 polypeptide, e.g., cell growth and/or differentiation or induction of apoptosis. In other embodiments, the subject Delta3 polypeptides can modulate neurogenesis (e.g., by inhibiting Notch expressing cells from becoming committed to a neural fate). In addition, Delta3 polypeptides which specifically antagonize the activity of a native Delta3 polypeptide, such as may be provided by truncation mutants or other dominant negative mutants, are also specifically provided herein.

[0044] In one embodiment, a polypeptide of the invention has an amino acid sequence sufficiently identical to an identified domain of a polypeptide of the invention. As used herein, the term “sufficiently identical” refers to a first amino acid or nucleotide sequence which contains a sufficient or minimum number of identical or equivalent (e.g., with a similar side chain) amino acid residues or nucleotides to a second amino acid or nucleotide sequence such that the first and second amino acid or nucleotide sequences have a common structural domain and/or common functional activity. For example, amino acid or nucleotide sequences which contain a common structural domain having about 65% identity, preferably 75% identity, more preferably 85%, 95%, or 98% identity.

[0045] In one embodiment, the polypeptide is identical to a Delta3 protein represented in SEQ ID NOs: 2, 25, 28, 30, 32, 34, 36, 38, 40, 42, 44 or 46, or the amino acid sequence encoded by the cDNA of a clone deposited with the ATCC® as Accession Number 98348. Preferably, a Delta3 polypeptide has an amino acid sequence, which is at least about 55%, 60%, 70%, preferably at least about 80%, more preferably at least about 90%, and even more preferably at least about 95% or 98% identical to the polypeptide represented by SEQ ID NOs: 2, 25, 28, 30, 32, 34, 36, 38, 40, 42, 44 or 46, or the amino acid sequence encoded by the cDNA of a clone deposited with the ATCC® as Accession Number 98348.

[0046] Also within the invention are isolated polypeptides or proteins having an amino acid sequence that is at least about 55%, preferably 65%, 75%, 85%, 95%, or 98% identical to the amino acid sequence of any of SEQ ID NOs: 2, 25, 28, 30, 32, 34, 36, 38, 40, 42, 44 or 46, or the amino acid sequence encoded by the cDNA of a clone deposited with the ATCC® as Accession Number 98348, wherein the polypeptides or proteins also exhibit at least one structural and/or functional feature of a polypeptide of the invention.

[0047] Also within the invention are isolated polypeptides or proteins which preferably are encoded by a nucleic acid molecule having a nucleotide sequence that is at least about 55%, more preferably 60%, 65%, 75%, 85%, or 95% identical the nucleic acid sequence encoding any of SEQ ID NOs: 2, 25, 28, 30, 32, 34, 36, 38, 40, 42, 44 or 46, wherein the polypeptides or proteins preferably also exhibit at least one structural and/or functional feature of a polypeptide of the invention, and isolated polypeptides or proteins which are encoded by a nucleic acid molecule having a nucleotide sequence which hybridizes under stringent hybridization conditions to a nucleic acid molecule having the sequence of any of SEQ ID NOs:1, 3, 24, 26, 27, 29, 31, 33, 35, 37, 39, 41, 43 or 45, or a complement thereof, or the non-coding strand of the cDNA of a clone deposited with the ATCC® as Accession Number 98348.

[0048] In a preferred embodiment, the Delta3 polypeptide is encoded by a nucleic acid which hybridizes in high stringency conditions with a nucleic acid sequence represented in one of SEQ ID NOs: 1, 3, 24, 26, 27, 29, 31, 33, 35, 37, 39, 41, 43 or 45 or with the nucleic acid contained in the plasmid having ATCC® Accession NO: 98348.

[0049] The subject Delta3 proteins also include modified proteins, which are resistant to post-translational modification, as for example, due to mutations which alter modification sites (such as tyrosine, threonine, serine or asparagine residues), or which prevent glycosylation of the protein, or which prevent interaction of the protein with intracellular proteins involved in signal transduction.

[0050] The Delta3 polypeptide can comprise a full-length protein, such as represented in SEQ ID NO: 2, 25, 28, 30, 32, 34, 36, 38, 40, 42, 44 or 46, or it can comprise a fragment corresponding to one or more particular motifs/domains (e.g., an extracellular domain, a DSL domain or an EGF-like domain, all of which are described below), or to other sizes, e.g., at least 5, 10, 25, 50, 100, 150, 200, 250, 300, 350, 400, 450, 500, 550, 600 or 650 amino acids in length.

[0051] The polypeptides of the invention can comprise at least one domain or motif of a Delta3 protein, i.e., a domain or motif selected from the group consisting of an amino-terminal signal peptide, a Delta-Serrated lag-2 (DSL) domain, Epidermal Growth Factor (EGF)-like domain 1, EGF-like domain 2, EGF-like domain 3, EGF-like domain 4, EGF-like domain 5, EGF-like domain 6, EGF-like domain 7, EGF-like domain 8, a Delta3 extracellular domain, a transmembrane domain (TM), and a cytoplasmic domain. Other polypeptides comprise soluble Delta3 proteins, e.g., Delta3 proteins comprising at least a portion, such as one or more domains, of the extracellular domain of a Delta3 protein. A soluble Delta3 protein is a protein that is soluble at physiological conditions, and includes but is not limited to a Delta3 protein that does not comprise a transmembrane domain, e.g., an extracellular Delta3 domain. These soluble polypeptides may or may not comprise a signal peptide. Other such polypeptides comprise soluble fusion proteins comprising Delta3 amino acid sequence and a heterologous amino acid sequence, e.g., an immunoglobulin constant region.

[0052] In one embodiment, the isolated polypeptide of the invention lacks both a transmembrane and a cytoplasmic domain. In another embodiment, the polypeptide lacks both a transmembrane domain and a cytoplasmic domain and is soluble under physiological conditions.

[0053] Also within the invention are polypeptides which are allelic variants of a polypeptide that includes the amino acid sequence of any of SEQ ID NOs: 2, 25, 28, 30, 32, 34, 36, 38, 40, 42, 44 or 46, or an amino acid sequence encoded by the cDNA of a clone deposited with the ATCC® as Accession Number 98348, wherein the polypeptide is encoded by a nucleic acid molecule which hybridizes under stringent conditions to a nucleic acid molecule having the sequence of any of SEQ ID NOs:1, 3, 24, 26, 27, 29, 31, 33, 35, 37, 39, 41, 43 or 45, or the nucleotide sequence of the cDNA of a clone deposited with the ATCC® as Accession Number 98348, or a complement thereof.

[0054] Also within the invention are polypeptides which are allelic variants of a polypeptide that includes the amino acid sequence of any of SEQ ID NOs: 2, 25, 28, 30, 32, 34, 36, 38, 40, 42, 44 or 46, or an amino acid sequence encoded by the cDNA of a clone deposited with the ATCC® as Accession Number 98348, wherein the polypeptide is encoded by a nucleic acid molecule which hybridizes under stringent conditions to a nucleic acid molecule having the sequence of any of SEQ ID NOs: 1, 3, 24, 26, 27, 29, 31, 33, 35, 37, 39, 41, 43 or 45, or the nucleotide sequence of the cDNA of a clone deposited with the ATCC® as Accession Number 98348, or a complement thereof, wherein such nucleic acid molecules encode polypeptides or proteins that exhibit at least one structural and/or functional feature of a polypeptide of the invention.

[0055] Another aspect of the invention features fusion proteins comprising a Delta3 amino acid sequence. For instance, the Delta3 protein can be provided as a recombinant fusion protein which includes a second polypeptide portion, e.g., a second polypeptide having an amino acid sequence unrelated (heterologous) to the Delta3 polypeptide, (e.g., the second polypeptide portion is glutathione-S-transferase, an enzymatic sequence such as alkaline phosphatase or an epitope tag).

[0056] Fusion proteins of the invention include, for example, Delta3 immunoglobulin (Delta3-Ig) fusion proteins. For example, a Delta3 fusion protein can comprise the extracellular portion of a Delta3 protein fused to the constant region of an immunoglobulin molecule. Preferred extracellular portions comprise at least one domain selected from the group consisting of a signal peptide, a DSL domain, and the eight EGF-like domains of a Delta3 protein. An even more preferred extracellular domain comprises an amino acid sequence from amino acid 1 to amino acid 529 of SEQ ID NO: 2 or from amino acid 1 to 530 of SEQ ID NO: 25. Yet other preferred Delta3 fusion proteins comprise a portion of a Delta3 protein that is sufficient for binding to a second protein, such as the DSL domain to a second protein which is, for example, a Notch protein.

[0057] Yet another aspect of the present invention concerns an immunogen comprising a Delta3 polypeptide in an immunogenic preparation, the immunogen being capable of eliciting an immune response specific for a Delta3 polypeptide, e.g., a humoral response, an antibody response and/or cellular response. In preferred embodiments, the immunogen comprises an antigenic determinant, e.g., a unique determinant, from the protein represented by SEQ ID NOs: 2, 25, 28, 30, 32, 34, 36, 38, 40, 42, 44 or 46, or the amino acid sequence encoded by the cDNA of a clone deposited with the ATCC® as Accession Number 98348.

[0058] A still further aspect of the present invention features antibodies and antibody preparations specifically reactive with an epitope of the Delta3 protein. In preferred embodiments, the antibody specifically binds to an epitope of a polypeptide shown in SEQ ID NOs: 2, 25, 28, 30, 32, 34, 36, 38, 40, 42, 44 or 46, or the amino acid sequence encoded by the cDNA of a clone deposited with the ATCC® as Accession Number 98348.

[0059] In yet a further aspect, the invention provides substantially purified antibodies or fragments thereof, including human or non-human antibodies or fragments thereof, which antibodies or fragments specifically bind to a polypeptide comprising an amino acid sequence selected from the group consisting of: the amino acid sequence of SEQ ID NOs: 2, 25, 28, 30, 32, 34, 36, 38, 40, 42, 44 or 46, or the amino acid sequence encoded by the cDNA insert of the plasmid deposited with the ATCC® as Accession Number 98348; a fragment of at least 15 amino acid residues of the amino acid sequence of SEQ ID NOs: 2, 25, 28, 30, 32, 34, 36, 38, 40, 42, 44 or 46, or the amino acid sequence encoded by the cDNA of a clone deposited with the ATCC® as Accession Number 98348; an amino acid sequence which is at least 95% identical to the amino acid sequence of SEQ ID NOs: 2, 25, 28, 30, 32, 34, 36, 38, 40, 42, 44 or 46, or the amino acid sequence encoded by the cDNA of a clone deposited with the ATCC® as Accession Number 98348 wherein the percent identity is determined using the ALIGN program of the GCG software package with a PAM120 weight residue table, a gap length penalty of 12, and a gap penalty of 4; and an amino acid sequence which is encoded by a nucleic acid molecule which hybridizes to the nucleic acid molecule consisting of SEQ ID NOs: 1, 3, 24, 26, 27, 29, 31, 33, 35, 37, 39, 41, 43 or 45, or the nucleotide sequence of the cDNA of a clone deposited with the ATCC® as Accession Number 98348, under conditions of hybridization of 6×SSC at 45□C and washing in 0.2×SSC, 0.1% SDS at 65° C. In various embodiments, the substantially purified antibodies of the invention, or fragments thereof, can be human, non-human, chimeric and/or humanized antibodies.

[0060] In another aspect, the invention provides human or non-human antibodies or fragments thereof, which antibodies or fragments specifically bind to a polypeptide comprising an amino acid sequence selected from the group consisting of: the amino acid sequence of SEQ ID NOs: 2, 25, 28, 30, 32, 34, 36, 38, 40, 42, 44 or 46, or the amino acid sequence encoded by the cDNA insert of the plasmid deposited with the ATCC® as Accession Number 98348; a fragment of at least 15 amino acid residues of the amino acid sequence of SEQ ID NOs: 2, 25, 28, 30, 32, 34, 36, 38, 40, 42, 44 or 46, or the amino acid sequence encoded by the cDNA of a clone deposited with the ATCC® as Accession Number 98348; an amino acid sequence which is at least 95% identical to the amino acid sequence of SEQ ID NOs: 2, 25, 28, 30, 32, 34, 36, 38, 40, 42, 44 or 46, or the amino acid sequence encoded by the cDNA of a clone deposited with the ATCC® as Accession Number 98348 wherein the percent identity is determined using the ALIGN program of the GCG software package with a PAM120 weight residue table, a gap length penalty of 12, and a gap penalty of 4; and an amino acid sequence which is encoded by a nucleic acid molecule which hybridizes to the nucleic acid molecule consisting of SEQ ID NOs: 1, 3, 24, 26, 27, 29, 31, 33, 35, 37, 39, 41, 43 or 45, or the nucleotide sequence of the cDNA of a clone deposited with the ATCC® as Accession Number 98348, under conditions of hybridization of 6×SSC at 45° C. and washing in 0.2×SSC, 0.1% SDS at 65° C. With respect to non-human antibodies, such antibodies can be goat, mouse, sheep, horse, chicken, rabbit, or rat antibodies. Alternatively, the non-human antibodies of the invention can be chimeric and/or humanized antibodies. In addition, the human and non-human antibodies of the invention can be polyclonal antibodies or monoclonal antibodies.

[0061] In still a further aspect, the invention provides monoclonal antibodies or fragments thereof, which antibodies or fragments specifically bind to a polypeptide comprising an amino acid sequence selected from the group consisting of: the amino acid sequence of SEQ ID NOs: 2, 25, 28, 30, 32, 34, 36, 38, 40, 42, 44 or 46, or the amino acid sequence encoded by the cDNA insert of the plasmid deposited with the ATCC® as Accession Number 98348; a fragment of at least 15 amino acid residues of the amino acid sequence of SEQ ID NOs: 2, 25, 28, 30, 32, 34, 36, 38, 40, 42, 44 or 46; an amino acid sequence which is at least 95% identical to the amino acid sequence of SEQ ID NOs: 2, 25, 28, 30, 32, 34, 36, 38, 40, 42, 44 or 46, or the amino acid sequence encoded by the cDNA of a clone deposited with the ATCC® as Accession Number 98348, wherein the percent identity is determined using the ALIGN program of the GCG software package with a PAM120 weight residue table, a gap length penalty of 12, and a gap penalty of 4; and an amino acid sequence which is encoded by a nucleic acid molecule which hybridizes to the nucleic acid molecule consisting of SEQ ID NOs: 1, 3, 24, 26, 27, 29, 31, 33, 35, 37, 39, 41, 43 or 45, or the nucleotide sequence of the cDNA of a clone deposited with the ATCC® as Accession Number 98348, under conditions of hybridization of 6×SSC at 45° C. and washing in 0.2×SSC, 0.1% SDS at 65° C. The monoclonal antibodies can be human, humanized, chimeric and/or non-human antibodies.

[0062] In a particularly preferred embodiment, the substantially purified antibodies or fragments thereof, the human and non-human antibodies or fragments thereof, and/or monoclonal antibodies or fragments thereof, of the invention specifically bind to an extracellular domain of the amino acid sequence of SEQ ID NOs: 2, 25, 28, 30, 32, 34, 36, 38, 40, 42, 44 or 46, or the amino acid sequence encoded by the cDNA of a clone deposited with the ATCC® as Accession Number 98348.

[0063] Preferably, the extracellular domain to which the antibody, or fragment thereof, binds comprises amino acid residues 1-529 of SEQ ID NO: 2 of human Delta3, or amino acid residues 1-530 of SEQ ID NO: 25 of murine Delta3.

[0064] Any of the antibodies of the invention can be conjugated to a therapeutic moiety or to a detectable substance. Non-limiting examples of detectable substances that can be conjugated to the antibodies of the invention are an enzyme, a prosthetic group, a fluorescent material, a luminescent material, a bioluminescent material, and a radioactive material.

[0065] The invention also provides a kit containing an antibody of the invention and instructions for use. Such kits can also comprise an antibody of the invention conjugated to a detectable substance and instructions for use. Still another aspect of the invention is a pharmaceutical composition comprising an antibody of the invention and a pharmaceutically acceptable carrier. In preferred embodiments, the pharmaceutical composition contains an antibody of the invention, a therapeutic moiety, and a pharmaceutically acceptable carrier.

[0066] In addition, the polypeptides of the invention or biologically active portions thereof, or antibodies of the invention, can be incorporated into pharmaceutical compositions, which optionally include pharmaceutically acceptable carriers.

[0067] The invention also features transgenic non-human animals which include (and preferably express) a heterologous form of a Delta3 gene described herein, or which misexpress (e.g., do not express) an endogenous Delta3 gene (e.g., an animal in which expression of one or more of the subject Delta3 proteins is disrupted). Such a transgenic animal can serve as an animal model for studying cellular or tissue disorders comprising mutated or mis-expressed Delta3 alleles or for use in drug screening. For example, the transgenic animals of the invention can be used as an animal model to study a neurological disease, e.g., ACCPN. Alternatively, such a transgenic animal can be useful for expressing recombinant polypeptides, and for generating cells, e.g., cell lines that can, for example, be utilized as part of screening techniques.

[0068] In another aspect, the invention provides a method for identifying a compound that binds to or modulates the activity of a polypeptide of the invention. In general, such methods entail measuring a biological activity of the polypeptide in the presence and absence of a test compound and identifying those compounds which alter the activity of the polypeptide.

[0069] The invention also features methods for identifying a compound which modulates the expression of a polypeptide or nucleic acid of the invention by measuring the expression of the polypeptide or nucleic acid in the presence and absence of the compound.

[0070] In one embodiment, the invention provides assays, e.g., for screening test compounds to identify agonists, or alternatively, antagonists, of a Delta3 activity. For example, the test compound may positively or negatively influence an interaction between a Delta3 protein and a Delta3 target molecule, for example, a Notch protein. An exemplary method includes the steps of (i) combining a Delta3 polypeptide or active fragment thereof, with a Delta3 target molecule, e.g., Notch, and a test compound, e.g., under conditions wherein, but for the test compound, the Delta3 protein and target molecule are able to interact; and (ii) detecting the formation of a complex which includes the Delta3 protein and the target molecule either by directly quantitating the complex, by measuring inductive effects of the Delta3 protein, or, in the instance of a substrate, measuring the conversion to product. A statistically significant change, such as a decrease, in the interaction of the Delta3 and target molecule in the presence of a test compound (relative to what is detected in the absence of the test compound) is indicative of a modulation (e.g., suppression or potentiation of the interaction between the Delta3 protein and the target molecule).

[0071] The invention provides yet other methods for identifying compounds which modulate a Delta activity. For example, a compound that interacts with a Delta3 protein can be identified by contacting a Delta3 protein with a test compound. Either the test compound or the Delta3 protein can be labeled. Optionally, the non-labeled compound or Delta3 protein can be attached to a solid phase support. Binding of the test compound to the Delta3 protein can then be determined, e.g by measuring the amount of label. Such a Delta3 binding molecule can be an agonist or an antagonist. In one embodiment, an agonist of a Delta3 activity is identified by contacting a cell having a Delta3 protein with a test compound and measuring a Delta3 activity, e.g., expression of a gene which is regulated by binding of a protein, e.g., a Notch protein, to Delta3. An increased expression of the gene when the cell is incubated with the test compound relative to incubation in the absence of the test compound indicates that the test compound is a Delta3 agonist. The gene that is monitored can also be a reporter gene transfected to a cell, the reporter gene being under the control of a promoter of a gene which is regulated by Delta3.

[0072] In another aspect, the invention provides methods for modulating activity of a polypeptide of the invention comprising contacting a cell with an agent that modulates (inhibits or stimulates) the activity or expression of a polypeptide of the invention such that activity or expression in the cell is modulated. In one embodiment, the agent is an antibody that specifically binds to a polypeptide of the invention.

[0073] In another embodiment, the agent modulates expression of a polypeptide of the invention by modulating transcription, splicing, or translation of an mRNA encoding a polypeptide of the invention. In yet another embodiment, the agent is a nucleic acid molecule having a nucleotide sequence that is antisense to the coding strand of an mRNA encoding a polypeptide of the invention.

[0074] Yet another aspect of the present invention concerns methods for treating diseases or conditions that are caused or contributed to by an aberrant Delta3 expression, level, or activity, e.g., aberrant cell proliferation, degeneration or differentiation, in a subject, by administering to the subject an effective amount of a modulator (e.g., an agonist or antagonist) of a Delta3 activity. In one embodiment, an agonist or antagonist can modulate Delta3 protein levels, by, e.g., modulating expression of a Delta3 gene. A modulator can, for example, be a protein of the invention, or, alternatively, a nucleic acid of the invention. In other embodiments, the modulator is a peptide, antibody, peptidomimetic, or other small organic molecule. For example, administration of a therapeutic comprised of a Delta3 agonist can be useful for promoting the tissue regeneration or repair needed to effectively treat a nerve injury, neurodegenerative disease, or neurodevelopmental disorder including but not limited to peripheral neuropathies, e.g., ACCPN, stroke, dementia, Alzheimer's disease, Parkinson's disease, Huntington's chorea, amylotrophic lateral sclerosis, and the like, as well as spinocerebellar degenerations.

[0075] Alternatively, administration of a Delta3 antagonist may be to effectively treat a neoplastic or hyperplastic disease, particularly of endothelial tissue.

[0076] Additionally, Delta3 agonists or antagonists may be used to treat various hematologic abnormalities such as neutropenia seen in patients undergoing chemotherapy, or immunodeficiency disorders such as AIDS. Delta3 nucleic acids, polypeptides or modulators thereof can also be utilized in treating or ameliorating a symptom of obesity and/or disorders that accompany or are exacerbated by an obese state, such as cardiovascular and circulatory disorders, metabolic abnormalities typical of obesity, such as hyperinsulinemia, insulin resistance, diabetes, including non-insulin dependent diabetes mellitus (NIDDM), insulin dependent diabetes mellitus (IDDM), and maturity onset diabetes of the young (MODY), disorders of energy homeostasis, disorders associated with lipid metabolism, such as cachexia, disorders associated with abnormal vasculogenesis (e.g., cancers, including, but not limited to, cancers of the epithelia (e.g., carcinomas of the pancreas, stomach, liver, secretory glands (e.g., adenocarcinoma), bladder, lung, breast, skin (e.g., fibromatosis or malignant melanoma), reproductive tract including prostate gland, ovary, cervix and uterus); cancers of the hematopoietic and immune system (e.g., leukemias and lymphomas); cancers of the central nervous, brain system and eye (e.g., gliomas, neuroblastoma and retinoblastoma); and cancers of connective tissues, bone, muscles and vasculature (e.g., hemangiomas and sarcomas)), disorders related to fetal development, in particular, disorders involving development of lung and kidney, lung-related disorders, atherosclerosis, e.g., the initiation and progression of atherosclerosis; and inflammatory-related disorders, e.g., asthma, allergy, and autoimmune disorders, neurological disorders, including developmental, cognitive and personality-related disorders, renal disorders, adrenal gland-related disorders; and disorders relating to skeletal muscle, such as dystrophic disorders.

[0077] The invention also provides methods for treating diseases or conditions associated with one or more specific Delta alleles, e.g., mutant allele, comprising administering to the subject an effective amount of a therapeutic compound. In one embodiment, the therapeutic compound is capable of compensating for the effect of the specific Delta allele. In another embodiment, the therapeutic compound is capable of modulating a Delta3 activity. In a one embodiment, the Delta allele is a Delta3 allele. For example, in one embodiment, the disease or condition is a neurological disease, e.g., ACCPN.

[0078] A further aspect of the present invention provides a method for determining whether a subject is at risk for developing a disease or condition, which is caused by or contributed to by an aberrant Delta3 activity, e.g. aberrant cell proliferation, degeneration or differentiation. In one embodiment, the disease or condition is a neurological disease, e.g., ACCPN. The method includes detecting, in a tissue of the subject, the presence or absence of a genetic lesion characterized by at least one of (i) a mutation of a gene encoding a Delta3 protein, e.g., as shown in SEQ ID Nos: 1, 3, 24, 26, 27, 29, 31, 33, 35, 37, 39, 41, 43 or 45, or the nucleotide sequence of the cDNA of a clone deposited with the ATCC® as Accession Number 98348, or a homolog thereof; or (ii) the mis-expression of a Delta3 gene. In one embodiments, detecting the genetic lesion includes ascertaining the existence of at least one of the following: a deletion of one or more nucleotides from a Delta3 gene; an addition of one or more nucleotides to the gene, a substitution of one or more nucleotides of the gene, a gross chromosomal rearrangement of the gene; an alteration in the level of a messenger RNA transcript of the gene; the presence of a non-wild type splicing pattern of a messenger RNA transcript of the gene; and/or a non-wild type level of the protein.

[0079] In a preferred embodiment, the invention provides a method for determining whether a subject has or is at risk of developing a disease or condition associated with a specific Delta3 allele, comprising determining the identity of a Delta3 allele in the subject. In an even more preferred embodiment, the disease or condition is a neurological disease, e.g., ACCPN. In another preferred embodiment, the disease is a vascular disorder. In another preferred embodiment, the disease is a neoplastic disorder. In another preferred embodiment the disease is a hematologic disorder. In another preferred embodiment the disease is an immunodeficiency disorder.

[0080] For example, detecting the genetic lesion or determining the identity of a Delta allele, e.g., a Delta3 allele, can include: (i) providing a probe/primer comprised of an oligonucleotide which hybridizes to a sense or antisense sequence of a Delta3 gene or naturally-occurring mutants thereof, or 5′ or 3′ flanking sequences naturally associated with the Delta3 gene; (ii) contacting the probe/primer with an appropriate nucleic acid containing sample; and (iii) detecting, by hybridization of the probe/primer to the nucleic acid, the presence or absence of the genetic lesion, e.g., by utilizing the probe/primer to determine the nucleotide sequence of the Delta3 gene and, optionally, of the flanking nucleic acid sequences. For instance, the primer can be employed in a polymerase chain reaction (PCR) or in a ligation chain reaction (LCR).

[0081] In another diagnostic method of the invention, at least a portion of a Delta3 gene of a subject is sequenced and the nucleotide sequence is compared to that of a wild-type Delta3 gene, to determine the presence of a genetic lesion. Another preferred diagnostic method of the invention is single strand conformation polymorphism (SSCP) which detects differences in electrophoretic mobility between mutant and wild-type nucleic acids.

[0082] In alternate embodiments, the diagnostic methods comprise determining the level of a Delta3 protein in an immunoassay using an antibody which is specifically immunoreactive with a wildtype or mutant Delta3 protein.

[0083] In another aspect, the present invention provides methods for detecting the presence of the activity or expression of a polypeptide of the invention in a biological sample by contacting the biological sample with an agent capable of detecting an indicator of activity such that the presence of activity is detected in the biological sample.

[0084] The present invention also provides diagnostic assays for identifying the presence or absence of a genetic lesion or mutation characterized by at least one of: (i) aberrant modification or mutation of a gene encoding a polypeptide of the invention, (ii) mis-regulation of a gene encoding a polypeptide of the invention, and (iii) aberrant post-translational modification of a polypeptide of the invention wherein a wild-type form of the gene encodes a polypeptide having the activity of the polypeptide of the invention.

[0085] Other features and advantages of the invention will be apparent from the following detailed description and claims.

### FTHMA-070 and TANGO85

[0086] The present invention is based, at least in part, on the discovery of a gene encoding FTHMA-070, a protein having homology to tumor necrosis factor (TNF) receptor and on the discovery of a gene encoding T85 (also referred to as FMHB-SD4 or FMHB-6D4).

[0087] The FTHMA-070 cDNA described below (SEQ ID NO:53) has a 1203 nucleotide open reading frame (nucleotides 73-1275 of SEQ ID NO:53; SEQ ID NO:55) which encodes a 403 amino acid protein (SEQ ID NO:54). This protein includes a predicted signal sequence of about 21 amino acids (from amino acid 1 to about amino acid 21 of SEQ ID NO:54) and a predicted mature protein of about 382 amino acids (from about amino acid 22 to amino acid 403 of SEQ ID NO:54; SEQ ID NO:56).

[0088] The T85 cDNA described below (SEQ ID NO:57) has a 2259 nucleotide open reading frame (nucleotides 958-3216 of SEQ ID NO:57; SEQ ID NO:59) which encodes a 753 amino acid protein (SEQ ID NO:58). This protein includes a predicted signal sequence of about 20 amino acids (from amino acid 1 to about amino acid 20 of SEQ ID NO:58) and a predicted mature protein of about 733 amino acids (from about amino acid 21 to amino acid 753 of SEQ ID NO:58; SEQ ID NO:60).

[0089] The nucleic acid and polypeptide molecules of the present invention are useful as modulating agents in regulating a variety of cellular processes. Accordingly, in one aspect, this invention provides isolated nucleic acid molecules encoding FTHMA-070 proteins or biologically active portions thereof, as well as nucleic acid fragments suitable as primers or hybridization probes for the detection of FTHMA-070-encoding nucleic acids. In another aspect, this invention provides isolated nucleic acid molecules encoding T85 proteins or biologically active portions thereof, as well as nucleic acid fragments suitable as primers or hybridization probes for the detection of T85-encoding nucleic acids.

[0090] The invention features a nucleic acid molecule which is at least 45% (or 55%, 65%, 75%, 85%, 95%, or 98%) identical to the nucleotide sequence shown in SEQ ID NO:53, or SEQ ID NO:55, or a complement thereof. The invention features a nucleic acid molecule which includes a fragment of at least 300 (325, 350, 375, 400, 425, 450, 500, 550, 600, 650, 700, 800, 900, 1000, or 1290) nucleotides of the nucleotide sequence shown in SEQ ID NO:53, or SEQ ID NO:55, or a complement thereof.

[0091] The invention also features a nucleic acid molecule which includes a nucleotide sequence encoding a protein having an amino acid sequence that is at least 45% (or 55%, 65%, 75%, 85%, 95%, or 98%) identical to the amino acid sequence of SEQ ID NO:54, SEQ ID NO:56. In a preferred embodiment, a FTHMA-070 nucleic acid molecule has the nucleotide sequence shown SEQ ID NO:53, or SEQ ID NO:55.

[0092] Also within the invention is a nucleic acid molecule which encodes a fragment of a polypeptide having the amino acid sequence of SEQ ID NO:54 or SEQ ID NO:56, the fragment including at least 15 (25, 30, 50, 100, 150, 300, or 400) contiguous amino acids of SEQ ID NO:54 or SEQ ID NO:56.

[0093] The invention includes a nucleic acid molecule which encodes a naturally occurring allelic variant of a polypeptide comprising the amino acid sequence of SEQ ID NO:54 or SEQ ID NO:56, wherein the nucleic acid molecule hybridizes to a nucleic acid molecule comprising SEQ ID NO:53 or SEQ ID NO:55 under stringent conditions.

[0094] Also within the invention are: an isolated FTHMA-070 protein having an amino acid sequence that is at least about 65%, preferably 75%, 85%, 95%, or 98% identical to the amino acid sequence of SEQ ID NO:56 (mature human FTHMA-070) or the amino acid sequence of SEQ ID NO:54 (immature human FTHMA-070).

[0095] Also within the invention are: an isolated FTHMA-070 protein which is encoded by a nucleic acid molecule having a nucleotide sequence that is at least about 65%, preferably 75%, 85%, or 95% identical to SEQ ID NO:55; and an isolated FTHMA-070 protein which is encoded by a nucleic acid molecule having a nucleotide sequence which hybridizes under stringent hybridization conditions to a nucleic acid molecule having the nucleotide sequence of SEQ ID NO:55.

[0096] Also within the invention is a polypeptide which is a naturally occurring allelic variant of a polypeptide that includes the amino acid sequence of SEQ ID NO:54 or SEQ ID NO:56, wherein the polypeptide is encoded by a nucleic acid molecule which hybridizes to a nucleic acid molecule comprising SEQ ID NO:53 or SEQ ID NO:55 under stringent conditions.

[0097] Another embodiment of the invention features FTHMA-070 nucleic acid molecules which specifically detect FTHMA-070 nucleic acid molecules. For example, in one embodiment, a FTHMA-070 nucleic acid molecule hybridizes under stringent conditions to a nucleic acid molecule comprising the nucleotide sequence of SEQ ID NO:53, SEQ ID NO:55, or a complement thereof. In another embodiment, the FTHMA-070 nucleic acid molecule is at least 300 (325, 350, 375, 400, 425, 450, 500, 550, 600, 650, 700, 800, 900, 1000, or 1200) nucleotides in length and hybridizes under stringent conditions to a nucleic acid molecule comprising the nucleotide sequence shown in SEQ ID NO:53 or SEQ ID NO:55, or a complement thereof. In another embodiment, the invention provides an isolated nucleic acid molecule which is antisense to the coding strand of a FTHMA-070 nucleic acid.

[0098] Another aspect of the invention provides a vector, e.g., a recombinant expression vector, comprising a FTHMA-070 nucleic acid molecule of the invention. In another embodiment the invention provides a host cell containing such a vector. The invention also provides a method for producing FTHAM-070 protein by culturing, in a suitable medium, a host cell of the invention containing a recombinant expression vector such that a FTHMA-070 protein is produced.

[0099] Another aspect of this invention features isolated or recombinant FTHMA-070 proteins and polypeptides. Preferred FTHMA-070 proteins and polypeptides possess at least one biological activity possessed by naturally occurring human FTHMA-070, e.g., the ability to form protein:protein interactions with other proteins.

[0100] The FTHMA-070 proteins of the present invention, or biologically active portions thereof, can be operatively linked to a non-FTHMA-070 polypeptide (e.g., heterologous amino acid sequences) to form FTHMA-070 fusion proteins. The invention further features antibodies that specifically bind FTHMA-070 proteins, such as monoclonal or polyclonal antibodies. In addition, the FTHMA-070 proteins or biologically active portions thereof can be incorporated into pharmaceutical compositions, which optionally include pharmaceutically acceptable carriers.

[0101] In another aspect, the present invention provides a method for detecting the presence of FTHMA-070 activity or expression in a biological sample by contacting the biological sample with an agent capable of detecting an indicator of FTHMA-070 activity such that the presence of FTHMA-070 activity is detected in the biological sample.

[0102] In another aspect, the invention provides a method for modulating FTHMA-070 activity comprising contacting a cell with an agent that modulates (inhibits or stimulates) FTHMA-070 activity or expression such that FTHMA-070 activity or expression in the cell is modulated. In one embodiment, the agent is an antibody that specifically binds to FTHMA-070 protein. In another embodiment, the agent modulates expression of FTHMA-070 by modulating transcription of a FTHMA-070 gene, splicing of a FTHMA-070 mRNA, or translation of a FTHMA-070 mRNA. In yet another embodiment, the agent is a nucleic acid molecule having a nucleotide sequence that is antisense to the coding strand of the FTHMA-070 mRNA or the FTHMA-070 gene.

[0103] In one embodiment, the methods of the present invention are used to treat a subject having a disorder characterized by aberrant FTHMA-070 protein or nucleic acid expression or activity by administering an agent which is a FTHMA-070 modulator to the subject. In one embodiment, the FTHMA-070 modulator is a FTHMA-070 protein. In another embodiment the FTHMA-070 modulator is a FTHMA-070 nucleic acid molecule. In other embodiments, the FTHMA-070 modulator is a peptide, peptidomimetic, or other small molecule.

[0104] The present invention also provides a diagnostic assay for identifying the presence or absence of a genetic lesion or mutation characterized by at least one of: (i) aberrant modification or mutation of a gene encoding a FTHMA-070 protein; (ii) mis-regulation of a gene encoding a FTHMA-070 protein; and (iii) aberrant post-translational modification of a FTHMA-070 protein, wherein a wild-type form of the gene encodes a protein with a FTHMA-070 activity.

[0105] In another aspect, the invention provides a method for identifying a compound that binds to or modulates the activity of a FTHMA-070 protein. In general, such methods entail measuring a biological activity of a FTHMA-070 protein in the presence and absence of a test compound and identifying those compounds which alter the activity of the FTHMA-070 protein.

[0106] The invention also features methods for identifying a compound which modulates the expression of FTHMA-070 by measuring the expression of FTHMA-070 in the presence and absence of a compound.

[0107] The invention features a nucleic acid molecule which is at least 45% (or 55%, 65%, 75%, 85%, 95%, or 98%) identical to the nucleotide sequence shown in SEQ ID NO:57, or SEQ ID NO:59, or a complement thereof. The invention features a nucleic acid molecule which includes a fragment of at least 300 (325, 350, 375, 400, 425, 450, 500, 550, 600, 650, 700, 800, 900, 1000, or 1290) nucleotides of the nucleotide sequence shown in SEQ ID NO:57, or SEQ ID NO:59, or a complement thereof.

[0108] The invention also features a nucleic acid molecule which includes a nucleotide sequence encoding a protein having an amino acid sequence that is at least 45% (or 55%, 65%, 75%, 85%, 95%, or 98%) identical to the amino acid sequence of SEQ ID NO:58 or SEQ ID NO:60. In a preferred embodiment, a T85 nucleic acid molecule has the nucleotide sequence shown SEQ ID NO:57, or SEQ ID NO:59.

[0109] Also within the invention is a nucleic acid molecule which encodes a fragment of a polypeptide having the amino acid sequence of SEQ ID NO:58 or SEQ ID NO:60, the fragment including at least 15 (25, 30, 50, 100, 150, 300, or 400) contiguous amino acids of SEQ ID NO:58 or SEQ ID NO:60.

[0110] The invention includes a nucleic acid molecule which encodes a naturally occurring allelic variant of a polypeptide comprising the amino acid sequence of SEQ ID NO:58 or SEQ ID NO:60, wherein the nucleic acid molecule hybridizes to a nucleic acid molecule comprising SEQ ID NO:57 or SEQ ID NO:59 under stringent conditions.

[0111] Also within the invention are: an isolated T85 protein having an amino acid sequence that is at least about 65%, preferably 75%, 85%, 95%, or 98% identical to the amino acid sequence of SEQ ID NO:60 (mature human T85) or the amino acid sequence of SEQ ID NO:58 (immature human T85); and an isolated T85 protein having an amino acid sequence that is at least about 85%, 95%, or 98% identical to one or more of the fibronectin type III domains and Ig superfamily domains described herein.

[0112] Also within the invention are: an isolated T85 protein which is encoded by a nucleic acid molecule having a nucleotide sequence that is at least about 65%, preferably 75%, 85%, or 95% identical to SEQ ID NO:59; an isolated T85 protein which is encoded by a nucleic acid molecule having a nucleotide sequence at least about 65% preferably 75%, 85%, or 95% identical a fibronectin III or Ig superfamily domain encoding portion of SEQ ID NO:57; and an isolated T85 protein which is encoded by a nucleic acid molecule having a nucleotide sequence which hybridizes under stringent hybridization conditions to a nucleic acid molecule having the nucleotide sequence of SEQ ID NO:59.

[0113] Also within the invention is a polypeptide which is a naturally occurring allelic variant of a polypeptide that includes the amino acid sequence of SEQ ID NO:58 or SEQ ID NO:60, wherein the polypeptide is encoded by a nucleic acid molecule which hybridizes to a nucleic acid molecule comprising SEQ ID NO:57 or SEQ ID NO:59 under stringent conditions.

[0114] Another embodiment of the invention features T85 nucleic acid molecules which specifically detect T85 nucleic acid molecules. For example, in one embodiment, a T85 nucleic acid molecule hybridizes under stringent conditions to a nucleic acid molecule comprising the nucleotide sequence of SEQ ID NO:57 or SEQ ID NO:59, or a complement thereof. In another embodiment, the T85 nucleic acid molecule is at least 300 (325, 350, 375, 400, 425, 450, 500, 550, 600, 650, 700, 800, 900, 1000, or 1290) nucleotides in length and hybridizes under stringent conditions to a nucleic acid molecule comprising the nucleotide sequence shown in SEQ ID NO:57 or SEQ ID NO:59, or a complement thereof. In a preferred embodiment, an isolated T85 nucleic acid molecule comprises a nucleodtide sequence of SEQ ID NO:57 which encodes a fibronectin type III domain, or a complement thereof. In another preferred embodiment, an isolated T85 nucleic acid molecule comprises a nucleotide of SEQ ID NO:57 which encodes an Ig superfamily domain, or a complement thereof. In another embodiment, the invention provides an isolated nucleic acid molecule which is antisense to the coding strand of a T85 nucleic acid.

[0115] Another aspect of the invention provides a vector, e.g., a recombinant expression vector, comprising a T85 nucleic acid molecule of the invention. In another embodiment the invention provides a host cell containing such a vector. The invention also provides a method for producing T85 protein by culturing, in a suitable medium, a host cell of the invention containing a recombinant expression vector such that a T85 protein is produced.

[0116] Another aspect of this invention features isolated or recombinant T85 proteins and polypeptides. Preferred T85 proteins and polypeptides possess at least one biological activity possessed by naturally occurring human T85, e.g., the ability to form protein:protein interactions with other proteins.

[0117] The T85 proteins of the present invention, or biologically active portions thereof, can be operatively linked to a non-T85 polypeptide (e.g., heterologous amino acid sequences) to form T85 fusion proteins. The invention further features antibodies that specifically bind T85 proteins, such as monoclonal or polyclonal antibodies. In addition, the T85 proteins or biologically active portions thereof can be incorporated into pharmaceutical compositions, which optionally include pharmaceutically acceptable carriers.

[0118] In another aspect, the present invention provides a method for detecting the presence of T85 activity or expression in a biological sample by contacting the biological sample with an agent capable of detecting an indicator of T85 activity such that the presence of T85 activity is detected in the biological sample.

[0119] In another aspect, the invention provides a method for modulating T85 activity comprising contacting a cell with an agent that modulates (inhibits or stimulates) T85 activity or expression such that T85 activity or expression in the cell is modulated. In one embodiment, the agent is an antibody that specifically binds to T85 protein. In another embodiment, the agent modulates expression of T85 by modulating transcription of a T85 gene, splicing of a T85 mRNA, or translation of a T85 mRNA. In yet another embodiment, the agent is a nucleic acid molecule having a nucleotide sequence that is antisense to the coding strand of the T85 mRNA or the T85 gene.

[0120] In one embodiment, the methods of the present invention are used to treat a subject having a disorder characterized by aberrant T85 protein or nucleic acid expression or activity by administering an agent which is a T85 modulator to the subject. In one embodiment, the T85 modulator is a T85 protein. In another embodiment the T85 modulator is a T85 nucleic acid molecule. In other embodiments, the T85 modulator is a peptide, peptidomimetic, or other small molecule.

[0121] The present invention also provides a diagnostic assay for identifying the presence or absence of a genetic lesion or mutation characterized by at least one of: (i) aberrant modification or mutation of a gene encoding a T85 protein; (ii) mis-regulation of a gene encoding a T85 protein; and (iii) aberrant post-translational modification of a T85 protein, wherein a wild-type form of the gene encodes a protein with a T85 activity.

[0122] In another aspect, the invention provides a method for identifying a compound that binds to or modulates the activity of a T85 protein. In general, such methods entail measuring a biological activity of a T85 protein in the presence and absence of a test compound and identifying those compounds which alter the activity of the T85 protein.

[0123] The invention also features methods for identifying a compound which modulates the expression of T85 by measuring the expression of T85 in the presence and absence of a compound.

### TANGO 77

[0124] The present invention is based, at least in part, on the discovery of a gene encoding Tango-77, a secreted protein that is predicted to be a member of the cytokine superfamily. The Tango-77 cDNA described below (SEQ ID NO:71) has three possible open reading frames. The first potential open reading frame encompasses 534 nucleotides extending from nucleotide 356 to nucleotide 889 of SEQ ID NO:71 (SEQ ID NO:73) and encodes a 178 amino acid protein (SEQ ID NO:72). This protein may include a predicted signal sequence of about 63 amino acids (from about amino acid 1 to about amino acid 63 of SEQ ID NO:72 (SEQ ID NO:74) and a predicted mature protein of about 115 amino acids (from about amino acid 64 to amino acid 178 of SEQ ID NO:72 (SEQ ID NO:75)).

[0125] The second potential open reading frame encompasses 498 nucleotides extending from nucleotide 389 to nucleotide 889 of SEQ ID NO:71 (SEQ ID NO:76) and encodes a 167 amino acid protein (SEQ ID NO:77). This protein may include a predicted signal sequence of about 52 amino acids (from about amino acid 1 to about amino acid 52 of SEQ ID NO:77 (SEQ ID NO:78)) and a predicted mature protein of about 115 amino acids (from about amino acid 52 to amino acid 167 of SEQ ID NO:77 (SEQ ID NO:79)).

[0126] The third potential open reading frame encompasses 408 nucleotides extending from nucleotide 481 to nucleotide 889 of SEQ ID NO:71 (SEQ ID NO:80) and encodes a 136 amino acid protein (SEQ ID NO:81). This protein includes a predicted signal sequence of about 21 amino acids (from about amino acid 1 to about amino acid 21 of SEQ ID NO:81 (SEQ ID NO:82)) and a predicted mature protein of about 115 amino acids (from about amino acid 22 to amino acid 136 of SEQ ID NO:81 (SEQ ID NO:83)).

[0127] As used herein, the terms “Tango-77”, “Tango-77 protein”, “Tango-77 polypeptide” and the like, can refer and polypeptide produced by the cDNA of SEQ ID NO:71 including any and all of the Tango-77 gene products described above.

[0128] Tango-77 is expected to inhibit inflammation and play a functional role similar to that of secreted IL-1ra. For example, it is expected that Tango-77 may bind to the IL-1 receptor, thus blocking receptor activation by inhibiting the binding of IL-1α and IL-1β to the receptor. Alternatively, Tango-77 may inhibit inflammation through another pathway, for example, by binding to a novel receptor. Accordingly, Tango-77 may be useful as a modulating agent in regulating a variety of cellular processes including acute and chronic inflammation, e.g., asthma, chronic myelogenous leukemia, rheumatoid arthritis, psoriasis and inflammatory bowel disease.

[0129] In one aspect, the invention provides isolated nucleic acid molecules encoding Tango-77 or biologically active portions thereof, as well as nucleic acid fragments suitable as primers or hybridization probes for the detection of Tango-77.

[0130] The invention encompasses methods of diagnosing and treating patients who are suffering from a disorder associated with an abnormal level (undesirably high or undesirably low) of inflammation, abnormal activity of the IL-1 receptor complex, or abnormal activity of IL-1, by administering a compound that modulates the expression of Tango-77 (at the DNA, mRNA or protein level, e.g., by altering mRNA splicing) or by altering the activity of Tango-77. Examples of such compounds include small molecules, antisense nucleic acid molecules, ribozymes, and polypeptides.

[0131] The invention features a nucleic acid molecule which is at least 45% (e.g., 55%, 65%, 75%, 85%, 95%, or 98%) identical to the nucleotide sequence shown in SEQ ID NO:71, SEQ ID NO:73, SEQ ID NO:76, SEQ ID NO:80, the nucleotide sequence of the cDNA insert of the plasmid deposited with ATCC as Accession Number (the “cDNA of ATCC 98807”), or a complement thereof.

[0132] The invention features a nucleic acid molecule which includes a fragment of at least 100 (e.g., 250, 325, 350, 375, 400, 425, 450, 500, 550, 600, 650, 700, 800, 900, or 989) nucleotides of the nucleotide sequence shown in SEQ ID NO:71, SEQ ID NO:73, SEQ ID NO:76, SEQ ID NO:80, the nucleotide sequence of the cDNA ATCC 98807, or a complement thereof.

[0133] The invention also features a nucleic acid molecule which includes a nucleotide sequence encoding a protein having an amino acid sequence that is at least 45% (55%, 65%, 75%, 85%, 95%, or 98%) identical to the amino acid sequence of SEQ ID NO:72, SEQ ID NO:75, SEQ ID NO:77, SEQ ID NO:79, SEQ ID NO:81, SEQ ID NO:83, or the amino acid sequence encoded by the cDNA of ATCC 98807.

[0134] In a preferred embodiment, a Tango-77 nucleic acid molecule has the nucleotide sequence shown in SEQ ID NO:71, SEQ ID NO:73, SEQ ID NO:76, SEQ ID NO:80 or the nucleotide sequence of the cDNA of ATCC 98807.

[0135] Also within the invention is a nucleic acid molecule which encodes a fragment of a polypeptide having the amino acid sequence of SEQ ID NO:72, SEQ ID NO:74, SEQ ID NO:75, SEQ ID NO:77, SEQ ID NO:78, SEQ ID NO:79, SEQ ID NO:81, SEQ ID NO:82, SEQ ID NO:83, wherein the fragment includes at least 15 (e.g., 25, 30, 50, 100, 150, or 178) contiguous amino acids of SEQ ID NO:72, SEQ ID NO:74, SEQ ID NO:75, SEQ ID NO:77, SEQ ID NO:78, SEQ ID NO:79, SEQ ID NO:81, SEQ ID NO:82, SEQ ID NO:83, or the polypeptide encoded by the cDNA of ATCC Accession Number 98807.

[0136] The invention includes a nucleic acid molecule which encodes a naturally occurring allelic variant of a polypeptide comprising the amino acid sequence of SEQ ID NO:72, SEQ ID NO:74, SEQ ID NO:75, SEQ ID NO:77, SEQ ID NO:78, SEQ ID NO:79, SEQ ID NO:81, SEQ ID NO:82, SEQ ID NO:83, or an amino acid sequence encoded by the cDNA of ATCC Accession Number 98807, wherein the nucleic acid molecule hybridizes to a nucleic acid molecule comprising SEQ ID NO:71, SEQ ID NO:73, SEQ ID NO:76, SEQ ID NO:80, or a complement thereof under stringent conditions.

[0137] Also within the invention are: an isolated Tango-77 protein having an amino acid sequence that is at least about 45%, preferably 65%, 75%, 85%, 95%, or 98% identical to the amino acid sequence of SEQ ID NO:75, SEQ ID NO:79 or SEQ ID NO:83 (mature human Tango-77), or the amino acid sequence of SEQ ID NO:72, SEQ ID NO:77 or SEQ ID NO:81 (immature human Tango-77).

[0138] Also within the invention are: an isolated Tango-77 protein which is encoded by a nucleic acid molecule having a nucleotide sequence that is at least about 65%, preferably 75%, 85%, or 95% identical to SEQ ID NO:73, SEQ ID NO:76, SEQ ID NO:80 or the cDNA of ATCC 98807; and an isolated Tango-77 protein which is encoded by a nucleic acid molecule having a nucleotide sequence which hybridizes under stringent hybridization conditions to a nucleic acid molecule having the nucleotide sequence of SEQ ID NO:73, SEQ ID NO:76, SEQ ID NO:80, the non-coding strand of the cDNA of ATCC 98807, or the complement thereof.

[0139] Also within the invention is a polypeptide which is a naturally occurring allelic variant of a polypeptide that includes the amino acid sequence of SEQ ID NO:72, SEQ ID NO:74, SEQ ID NO:75, SEQ ID NO:77, SEQ ID NO:78, SEQ ID NO:79, SEQ ID NO:81, SEQ ID NO:82, SEQ ID NO:83, or an amino acid sequence encoded by the cDNA insert of the plasmid deposited with ATCC as Accession Number 98807, wherein the polypeptide is encoded by a nucleic acid molecule which hybridizes to a nucleic acid molecule comprising SEQ ID NO:71, SEQ ID NO:73, SEQ ID NO:76, SEQ ID NO:80 or the complement thereof under stringent conditions.

[0140] Another embodiment of the invention features Tango-77 nucleic acid molecules which specifically detect Tango-77 nucleic acid molecules relative to nucleic acid molecules encoding other members of the cytokine superfamily. For example, in one embodiment, a Tango-77 nucleic acid molecule hybridizes under stringent conditions to a nucleic acid molecule comprising the nucleotide sequence of SEQ ID NO:71, SEQ ID NO:73, SEQ ID NO:76, SEQ ID NO:80, the cDNA of ATCC 98807, or a complement thereof. In another embodiment, the Tango-77 nucleic acid molecule is at least 300 (325, 350, 375, 400, 425, 450, 500, 550, 600, 650, 700, 800, 900, or 989) nucleotides in length and hybridizes under stringent conditions to a nucleic acid molecule comprising the nucleotide sequence shown in SEQ ID NO:71, SEQ ID NO:73, SEQ ID NO:76, SEQ ID NO:80, the cDNA of ATCC 98807, or a complement thereof. In yet another embodiment, the invention provides an isolated nucleic acid molecule which is antisense to the coding strand of a Tango-77 nucleic acid.

[0141] Another aspect of the invention provides a vector, e.g., a recombinant expression vector, comprising a Tango-77 nucleic acid molecule of the invention. In another embodiment, the invention provides a host cell containing such a vector. The invention also provides a method for producing Tango-77 protein by culturing, in a suitable medium, a host cell of the invention containing a recombinant expression vector such that a Tango-77 protein is produced.

[0142] Another aspect of this invention features isolated or recombinant Tango-77 proteins and polypeptides. Preferred Tango-77 proteins and polypeptides possess at least one biological activity possessed by naturally occurring human Tango-77, e.g., (i) the ability to interact with proteins in the Tango-77 signalling pathway (ii) the ability to interact with a Tango-77 ligand or receptor; or (iii) the ability to interact with an intracellular target protein, (iv) the ability to interact with a protein involved in inflammation and (v) the ability to bind the IL-1 receptor. Other activities include the induction and suppression of polypeptide interleukins, cytokines and growth factors.

[0143] The Tango-77 proteins of the present invention, or biologically active portions thereof, can be operably linked to a non-Tango-77 polypeptide (e.g., heterologous amino acid sequences) to form Tango-77 fusion proteins. The invention further features antibodies that specifically bind Tango-77 proteins, such as monoclonal or polyclonal antibodies. In addition, the Tango-77 proteins or biologically active portions thereof can be incorporated into pharmaceutical compositions, which optionally include pharmaceutically acceptable carriers.

[0144] In another aspect, the present invention provides a method for detecting the presence of Tango-77 activity or expression in a biological sample by contacting the biological sample with an agent capable of detecting an indicator of Tango-77 activity or expression such that the presence of Tango-77 activity or expression is detected in the biological sample.

[0145] In another aspect, the invention provides a method for modulating Tango-77 activity comprising contacting a cell with an agent that modulates (inhibits or stimulates) Tango-77 activity or expression such that Tango-77 activity or expression in the cell is modulated. In one embodiment, the agent is an antibody that specifically binds to Tango-77 protein.

[0146] In another embodiment, the agent modulates expression of Tango-77 by modulating transcription of a Tango-77 gene, splicing of a Tango-77 mRNA, or translation of a Tango-77 mRNA. In yet another embodiment, the agent is a nucleic acid molecule having a nucleotide sequence that is antisense to the coding strand of the Tango-77 mRNA or the Tango-77 gene.

[0147] In one embodiment, the methods of the present invention are used to treat a subject having a disorder characterized by aberrant Tango-77 protein activity or nucleic acid expression by administering an agent which is a Tango-77 modulator to the subject. In one embodiment, the Tango-77 modulator is a Tango-77 protein. In another embodiment, the Tango-77 modulator is a Tango-77 nucleic acid molecule. In other embodiments, the Tango-77 modulator is a peptide, peptidomimetic, or other small molecule. In a preferred embodiment, the disorder characterized by aberrant Tango-77 protein or nucleic acid expression can include chronic and acute inflammation.

[0148] The present invention also provides a diagnostic assay for identifying the presence or absence of a genetic lesion or mutation characterized by at least one of: (i) aberrant modification or mutation of a gene encoding a Tango-77 protein; (ii) mis-regulation of a gene encoding a Tango-77 protein; and (iii) aberrant post-translational modification of a Tango-77 protein, wherein a wild-type form of the gene encodes a protein with a Tango-77 activity.

[0149] In another aspect, the invention provides a method for identifying a compound that binds to or modulates the activity of a Tango-77 protein. In general, such methods entail measuring a biological activity of a Tango-77 protein in the presence and absence of a test compound and identifying those compounds which alter the activity of the Tango-77 protein.

[0150] The invention also features methods for identifying a compound which modulates the expression of Tango-77 by measuring the expression of Tango-77 in the presence and absence of a compound.

### SPOIL

[0151] The present invention is based, at least in part, on the discovery of novel nucleic acid molecules which encode a novel family of proteins having homology to IL-1 receptor antagonist (IL-1ra) molecules, referred to herein as SPOIL nucleic acid and protein molecules. The SPOIL molecules of the present invention are useful as modulating agents in regulating a variety of cellular processes. Accordingly, in one aspect, this invention provides isolated nucleic acid molecules encoding SPOIL proteins and biologically active portions thereof, as well as nucleic acid fragments suitable as primers or hybridization probes for the detection of SPOIL-encoding nucleic acids. In one embodiment, an isolated nucleic acid molecule of the present invention preferably encodes a SPOIL protein which includes an interleukin-1 (IL-1) signature domain.

[0152] In another embodiment, an isolated nucleic acid molecule of the present invention preferably encodes a SPOIL protein which includes a SPOIL signature motif. In another embodiment, an isolated nucleic acid molecule of the present invention preferably encodes a SPOIL protein which includes a SPOIL unique domain. In another embodiment, an isolated nucleic acid molecule of the present invention preferably encodes a SPOIL protein which includes a SPOIL C-terminal unique domain. In another embodiment, an isolated nucleic acid molecule of the present invention preferably encodes a SPOIL protein which includes a signal sequence and/or is secreted. In yet another embodiment, an isolated nucleic acid molecule of the present invention preferably encodes a SPOIL protein which lacks a signal sequence and/or is intracellular. In another embodiment, the nucleic acid molecule is a naturally occurring nucleotide sequence.

[0153] In another embodiment, a nucleic acid molecule of the invention has 65% identity with the nucleotide sequence shown in SEQ ID NO:89, SEQ ID NO:101, SEQ ID NO:104, SEQ ID NO:112, the DNA insert of the plasmid deposited with ATCC as Accession Number 98883, the DNA insert of the plasmid deposited with ATCC as Accession Number 98984 or a complement thereof and, preferably, encodes a SPOIL protein. In yet another embodiment, the isolated nucleic acid molecule has 65% identity with the nucleotide sequence shown in SEQ ID NO:91, SEQ ID NO:103, SEQ ID NO:106, SEQ ID NO:114, or a complement thereof and, preferably, encodes a SPOIL protein. In a preferred embodiment, an isolated nucleic acid molecule encodes the amino acid sequence of a mammalian protein, (e.g., a human or mouse SPOIL protein.)

[0154] In another embodiment, the isolated nucleic acid molecule includes a nucleotide sequence encoding a protein having an amino acid sequence sufficiently homologous to the amino acid sequence of SEQ ID NO:90; SEQ ID NO:102, SEQ ID NO:105, SEQ ID NO:113, the amino acid sequence encoded by the DNA insert of the plasmid deposited with ATCC as Accession Number 98883, or the DNA insert of the plasmid deposited with ATCC as Accession Number 98984 and, preferably, encodes a SPOIL protein. In a preferred embodiment, the nucleic acid molecule has the nucleotide sequence shown in SEQ ID NO:91, SEQ ID NO:103, SEQ ID NO:106, or SEQ ID NO:114. In another preferred embodiment, the nucleic acid molecule has the nucleotide sequence shown in SEQ ID NO:89, SEQ ID NO:101, SEQ ID NO:104, SEQ ID NO:112, the DNA insert of the plasmid deposited with ATCC as Accession Number 98883, or the DNA insert of the plasmid deposited with ATCC as Accession Number 98984.

[0155] Another embodiment of the invention features isolated nucleic acid molecules which hybridize under stringent conditions to a nucleic acid molecule consisting of nucleotides 135-428 or nucleotides 495-746 of SEQ ID NO:89. In yet another preferred embodiment, the isolated nucleic acid molecules hybridize under stringent conditions to a nucleic acid molecule consisting of nucleotides 1-280, 123-260, or nucleotides 390-1291 of SEQ ID NO:101. In yet another preferred embodiment, the isolated nucleic acid molecules hybridize under stringent conditions to a nucleic acid molecule consisting of nucleotides 1-371, 98-721, or nucleotides 481-1377 of SEQ ID NO:104. In yet another preferred embodiment, the isolated nucleic acid molecules hybridize under stringent conditions to a nucleic acid molecule consisting of nucleotides 225-365, 96-575, or nucleotides 495-838 of SEQ ID NO:112. In another embodiment, the nucleic acid molecule is at least 300 nucleotides in length. In another embodiment, the nucleic acid molecule is at least 300 nucleotides in length and hybridizes under stringent conditions to a nucleic acid molecule comprising the nucleotide sequence shown in SEQ ID NO:89, SEQ ID NO:101, SEQ ID NO:104, SEQ ID NO:112, the DNA insert of the plasmid deposited with ATCC as Accession Number 98883, or the DNA insert of the plasmid deposited with ATCC as Accession Number 98984, or a complement thereof. In yet another embodiment, the nucleic acid molecule is at least 300 nucleotides in length and encodes a SPOIL protein or portion thereof, preferably a biologically active portion thereof.

[0156] In a preferred embodiment, an isolated nucleic acid molecule comprises nucleotides 135-428 of SEQ ID NO:89, or a complement thereof. In another embodiment, the nucleic acid molecule further comprises nucleotides 1-134 of SEQ ID NO:89. In yet another embodiment, the nucleic acid molecule further comprises nucleotides 429-746 of SEQ ID NO:89.

[0157] In another preferred embodiment, an isolated nucleic acid molecule comprises nucleotides 124-630 of SEQ ID NO:101, or a complement thereof. In another embodiment, the nucleic acid molecule further comprises nucleotides 1-123 of SEQ ID NO:101. In yet another embodiment, the nucleic acid molecule further comprises nucleotides 631-1291 of SEQ ID NO:101.

[0158] In another preferred embodiment, an isolated nucleic acid molecule comprises nucleotides 98-721 of SEQ ID NO:104, or a complement thereof. In another embodiment, the nucleic acid molecule further comprises nucleotides 1-97 of SEQ ID NO:104. In yet another embodiment, the nucleic acid molecule further comprises nucleotides 722-1377 of SEQ ID NO:104.

[0159] In another preferred embodiment, an isolated nucleic acid molecule comprises nucleotides 96-575 of SEQ ID NO:112, or a complement thereof. In another embodiment, the nucleic acid molecule further comprises nucleotides 1-95 of SEQ ID NO:112. In yet another embodiment, the nucleic acid molecule further comprises nucleotides 576-838 of SEQ ID NO:112.

[0160] Another embodiment the invention provides an isolated nucleic acid molecule which is antisense to the coding strand of a SPOIL nucleic acid.

[0161] Another aspect of the invention provides a vector comprising a nucleic acid molecule of the invention, preferably a SPOIL nucleic acid molecule. In certain embodiments, the vector is a recombinant expression vector. In another embodiment, the invention provides a host cell containing a vector of the invention. The invention also provides a method for producing SPOIL protein by culturing in a suitable medium, a host cell of the invention containing a recombinant expression vector such that SPOIL protein is produced.

[0162] Another aspect of this invention features isolated or recombinant proteins and polypeptides, preferably SPOIL proteins or polypeptides. In one embodiment, an isolated protein, preferably a SPOIL protein, has a SPOIL signature motif. In another embodiment, an isolated protein, preferably a SPOIL protein, has an IL-1 signature domain. In another embodiment, an isolated protein, preferably a SPOIL protein, has a SPOIL unique domain. In another embodiment, an isolated protein, preferably a SPOIL protein, has a SPOIL C-terminal unique domain. In another embodiment, an isolated protein, preferably a SPOIL protein, has a combination of two or more of the above-stated domains and/or motifs. In yet another embodiment, an isolated protein, preferably a SPOIL protein, has a signal sequence and/or is secreted. In yet another embodiment, an isolated protein, preferably a SPOIL protein, lacks a signal sequence and/or is intracellular. In another embodiment, an isolated protein, preferably a SPOIL protein, has an amino acid sequence sufficiently homologous to the amino acid sequence of SEQ ID NO:90, SEQ ID NO:102, SEQ ID NO:105, SEQ ID NO:113, the amino acid sequence encoded by the DNA insert of the plasmid deposited with ATCC as Accession Number 98883, or the amino acid sequence encoded by the DNA insert of the plasmid deposited with ATCC as Accession Number 98984. This invention further features isolated proteins, preferably SPOIL proteins, having an amino acid sequence at least about 45% identical to a SPOIL unique domain amino acid sequence. This invention further features isolated proteins, preferably SPOIL proteins, having an amino acid sequence at least about 45% identical to a SPOIL C-terminal unique domain amino acid sequence.

[0163] In another embodiment, the invention features fragments of the protein having the amino acid sequence of SEQ ID NO:90, SEQ ID NO:102, SEQ ID NO:105, SEQ ID NO:113, the amino acid sequence encoded by the DNA insert of the plasmid deposited with ATCC as Accession Number 98883, or the amino acid sequence encoded by the DNA insert of the plasmid deposited with ATCC as Accession Number 98984, wherein the fragment comprises at least 15 contiguous amino acids of the amino acid sequence of SEQ ID NO:90, SEQ ID NO:102, SEQ ID NO:105, SEQ ID NO:113, the amino acid sequence encoded by the DNA insert of the plasmid deposited with ATCC as Accession Number 98883, or the amino acid sequence encoded by the DNA insert of the plasmid deposited with ATCC as Accession Number 98984. In a preferred embodiment, the protein has the amino acid sequence of SEQ ID NO:90, SEQ ID NO:102, SEQ ID NO:105, or SEQ ID NO:113.

[0164] Another embodiment of the invention features an isolated protein, preferably a SPOIL protein, having an amino acid sequence at least about 60% identical to the amino acid sequence of SEQ ID NO:90, SEQ ID NO:102, SEQ ID NO:105, or SEQ ID NO:113, the amino acid sequence encoded by the DNA insert of the plasmid deposited with ATCC as Accession Number 98883, or the amino acid sequence encoded by the DNA insert of the plasmid deposited with ATCC as Accession Number 98984. Another embodiment of the invention features an isolated protein, preferably a SPOIL protein, having an amino acid sequence at least about 85% identical to the amino acid sequence of SEQ ID NO:102 or the amino acid sequence encoded by the DNA insert of the plasmid deposited with ATCC as Accession Number 98984. Yet another embodiment of the invention features isolated proteins, preferably SPOIL proteins, which are encoded by nucleic acid molecules having a nucleotide sequence at least about 60% identical to a nucleotide sequence of SEQ ID NO:89, SEQ ID NO:91, SEQ ID NO:101, SEQ ID NO:103; SEQ ID NO:104, SEQ ID NO:106, SEQ ID NO:112, SEQ ID NO:114, the DNA insert of the plasmid deposited with ATCC as Accession Number 98883, or the DNA insert of the plasmid deposited with ATCC as Accession Number 98984, or a complement thereof.

[0165] This invention further features isolated proteins, preferably SPOIL proteins, which are encoded by nucleic acid molecules having a nucleotide sequence which hybridizes under stringent hybridization conditions to the complement of a nucleic acid molecule comprising the nucleotide sequence of SEQ ID NO:89, SEQ ID NO:91, SEQ ID NO:101, SEQ ID NO:103; SEQ ID NO:104, SEQ ID NO:106, SEQ ID NO:112, or SEQ ID NO:114.

[0166] The proteins of the present invention, preferably SPOIL proteins, or portions thereof (e.g., biologically active portions thereof), can be operatively linked to a non-SPOIL polypeptide to form fusion proteins, preferably SPOIL fusion proteins. The invention further features antibodies that specifically bind SPOIL proteins, such as monoclonal or polyclonal antibodies. In addition, the proteins of the invention or biologically active portions thereof can be incorporated into pharmaceutical compositions, which optionally include pharmaceutically acceptable carriers.

[0167] In another aspect, the present invention provides a method for detecting the presence of SPOIL activity or expression in a biological sample by contacting the biological sample with an agent capable of detecting an indicator of SPOIL activity such that the presence of SPOIL activity is detected in the biological sample.

[0168] In another aspect, the invention provides a method for modulating SPOIL activity comprising contacting a cell capable of expressing SPOIL with an agent that modulates SPOIL activity such that SPOIL activity in the cell is modulated. In one embodiment, the agent inhibits SPOIL activity. In another embodiment, the agent stimulates SPOIL activity. In one embodiment, the agent is an antibody that specifically binds to SPOIL protein. In another embodiment, the agent modulates expression of SPOIL by modulating transcription of a SPOIL gene or translation of a SPOIL mRNA. In yet another embodiment, the agent is a nucleic acid molecule having a nucleotide sequence that is antisense to the coding strand of the SPOIL mRNA or the SPOIL gene.

[0169] In another aspect, the invention provides a method for modulating IL-1 activity comprising contacting a cell capable of expressing and/or responding to IL-1 with an agent that modulates SPOIL activity such that IL-1 activity in the cell is modulated. In one embodiment, an agent inhibits or reduces IL-1 activity. Thus, in one embodiment, the SPOIL agent is a protein of the invention, preferably a SPOIL protein or a biologically active portion thereof which functions as an IL-1 receptor antagonist. In another embodiment, a SPOIL agent stimulates IL-1 activity. Thus, in another embodiment, the SPOIL agent is a protein of the invention, preferably a SPOIL protein, SPOIL variant, or biologically active portion thereof which functions as an IL-1 receptor agonist.

[0170] In another embodiment, the SPOIL agent is a protein of the invention, preferably a SPOIL protein or a biologically active portion thereof, which modulates an anti-inflammatory cytokine (e.g., soluble TNF-Receptor p55 (sTNFRp55), sTNFRp75 and IL-1 receptor antagonist (IL-1Ra)). In yet another embodiment, the SPOIL agent is a protein of the invention, preferably a SPOIL protein, SPOIL variant, or biologically active portion thereof, which modulates a pro-inflammatory cytokine (e.g., tumor necrosis factor (TNF-a), interleukin-6 (IL-6) and interleukin-1b (IL-1b)).

[0171] In one embodiment, the methods of the present invention are used to treat a subject having a disorder characterized by aberrant SPOIL and/or IL-1 expression by administering an agent which is a SPOIL modulator to the subject. In one embodiment, the SPOIL agent is a SPOIL protein or SPOIL variant. In yet another embodiment, the SPOIL agent is a peptide, peptidomimetic, or other small molecule. In a preferred embodiment, the disorder characterized by aberrant SPOIL and/or IL-1 expression is a bone metabolism disorder, a proinflammatory disorder, or an immune disorder.

[0172] The present invention also provides a diagnostic assay for identifying the presence or absence of a genetic alteration characterized by at least one of (i) aberrant modification or mutation of a gene encoding a SPOILprotein; (ii) mis-regulation of said gene; and (iii) aberrant post-translational modification of a SPOIL protein, wherein a wild-type form of said gene encodes an protein with a SPOILactivity.

[0173] In another aspect, the invention provides a method for identifying a compound that binds to or modulates the activity of a SPOIL protein, by providing an indicator composition comprising an a SPOIL protein having SPOIL activity, contacting the indicator composition with a test compound, and determining the effect of the test compound on SPOIL activity in the indicator composition to identify a compound that modulates the activity of a SPOIL protein.

### NEOKINE

[0174] The present invention is based, at least in part, on the discovery of nucleic acid molecules which encode a novel family of secreted proteins, referred to herein as the Neokine family of proteins (“NEOKINES” or “NEOKINE proteins”) which are ligands for a previously-identified putative G protein-coupled receptor termed “RDC1” also referred to herein as the “NEOKINE receptor”. The NEOKINE molecules of the present invention are useful as modulating agents in regulating a variety of cellular processes. Accordingly, in one aspect, this invention provides isolated nucleic acid molecules encoding NEOKINE proteins or biologically active portions thereof, as well as nucleic acid fragments suitable as primers or hybridization probes for the detection of NEOKINE-encoding nucleic acids.

[0175] In one embodiment, a NEOKINE nucleic acid molecule is 60% homologous to the nucleotide sequence shown in SEQ ID NO:115, SEQ ID NO:117, the nucleotide sequence of the DNA insert of the plasmid deposited with ATCC as Accession Number 98751, or complement thereof. In another embodiment, a NEOKINE nucleic acid molecule is 60% homologous to the nucleotide sequence shown in SEQ ID NO:118, SEQ ID NO:120, or a complement thereof. In yet another embodiment, a NEOKINE nucleic acid molecule is 60% homologous to the nucleotide sequence shown in SEQ ID NO:121 or SEQ ID NO:123. In yet another embodiment, a NEOKINE nucleic acid molecule is 60% homologous to the nucleotide sequence shown in SEQ ID NO:124. In a preferred embodiment, an isolated NEOKINE nucleic acid molecule has the nucleotide sequence shown SEQ ID NO:117, or a complement thereof. In another embodiment, a NEOKINE nucleic acid molecule further comprises nucleotides 1-96 of SEQ ID NO:115. In another embodiment, a NEOKINE nucleic acid molecule further comprises nucleotides 394-1564 of SEQ ID NO:115. In another preferred embodiment, an isolated NEOKINE nucleic acid molecule has the nucleotide sequence shown in SEQ ID NO:115.

[0176] In another preferred embodiment, an isolated NEOKINE nucleic acid molecule has the nucleotide sequence shown SEQ ID NO:120, or a complement thereof. In another embodiment, a NEOKINE nucleic acid molecule further comprises nucleotides 1-211 of SEQ ID NO:118. In another embodiment, a NEOKINE nucleic acid molecule further comprises nucleotides 509-1656 of SEQ ID NO:118. In another preferred embodiment, an isolated NEOKINE nucleic acid molecule has the nucleotide sequence shown in SEQ ID NO:118.

[0177] In another preferred embodiment, an isolated NEOKINE nucleic acid molecule has the nucleotide sequence shown SEQ ID NO:123, or a complement thereof. In another embodiment, a NEOKINE nucleic acid molecule further comprises nucleotides 235-1372 of SEQ ID NO:121. In another preferred embodiment, an isolated NEOKINE nucleic acid molecule has the nucleotide sequence shown in SEQ ID NO:121.

[0178] In another preferred embodiment, an isolated NEOKINE nucleic acid molecule has the nucleotide sequence shown SEQ ID NO:136, or a complement thereof. In another embodiment, a NEOKINE nucleic acid molecule further comprises nucleotides 285-1458 of SEQ ID NO:124. In another preferred embodiment, an isolated NEOKINE nucleic acid molecule has the nucleotide sequence shown in SEQ ID NO:124.

[0179] In another preferred embodiment, an isolated NEOKINE nucleic acid molecule is of human origin and has the nucleotide sequence of the DNA insert of the plasmid deposited with ATCC as Accession Number 98751, or a complement thereof. In another embodiment, an isolated NEOKINE nucleic acid molecule is of rat origin. In another embodiment, an isolated NEOKINE nucleic acid molecule is of macaque origin.

[0180] In another embodiment, a NEOKINE nucleic acid molecule includes a nucleotide sequence encoding a protein having an amino acid sequence sufficiently homologous to the amino acid sequence of SEQ ID NO:116, SEQ ID NO:119, SEQ ID NO:122, or SEQ ID NO:125. In another preferred embodiment, a NEOKINE nucleic acid molecule includes a nucleotide sequence encoding a protein having an amino acid sequence at least 60% homologous to the amino acid sequence of SEQ ID NO:116. In yet another preferred embodiment, a NEOKINE nucleic acid molecule includes a nucleotide sequence encoding a protein having an amino acid sequence at least 60% homologous to the amino acid sequence of SEQ ID NO:119. In yet another preferred embodiment, a NEOKINE nucleic acid molecule includes a nucleotide sequence encoding a protein having an amino acid sequence at least 60% homologous to the amino acid sequence of SEQ ID NO:122. In yet another preferred embodiment, a NEOKINE nucleic acid molecule includes a nucleotide sequence encoding a protein having an amino acid sequence at least 60% homologous to the amino acid sequence of SEQ ID NO:125.

[0181] In another embodiment, an isolated nucleic acid molecule of the present invention encodes a NEOKINE protein which includes a NEOKINE CXC signature motif. In another embodiment, an isolated nucleic acid molecule of the present invention encodes a NEOKINE protein which includes a NEOKINE CXC signature motif and a signal sequence and is secreted. In yet another embodiment, a NEOKINE nucleic acid molecule encodes a NEOKINE protein and is a naturally occurring nucleotide sequence.

[0182] Another embodiment of the invention features NEOKINE nucleic acid molecules which specifically detect NEOKINE nucleic acid molecules relative to nucleic acid molecules encoding non-NEOKINE proteins. For example, in one embodiment, a NEOKINE nucleic acid molecule is at least 650 nucleotides in length and hybridizes under stringent conditions to a nucleic acid molecule comprising the nucleotide sequence shown in SEQ ID NO:115, SEQ ID NO:118, SEQ ID NO:121, or SEQ ID NO:124, or a complement thereof.

[0183] Another embodiment of the invention provides an isolated nucleic acid molecule which is antisense to the coding strand of a NEOKINE nucleic acid.

[0184] Another aspect of the invention provides a vector comprising a NEOKINE nucleic acid molecule. In certain embodiments, the vector is a recombinant expression vector. In another embodiment, the invention provides a host cell containing a vector of the invention. The invention also provides a method for producing a NEOKINE protein by culturing in a suitable medium, a host cell of the invention containing a recombinant expression vector such that a NEOKINE protein is produced.

[0185] Another aspect of this invention features isolated or recombinant NEOKINE proteins and polypeptides. In one embodiment, an isolated NEOKINE protein includes a NEOKINE CXC signature motif and is secreted. In another embodiment, an isolated NEOKINE protein includes a NEOKINE CXC signature motif and a signal sequence, and is secreted. In another embodiment, an isolated NEOKINE protein has an amino acid sequence sufficiently homologous to the amino acid sequence of SEQ ID NO:116, SEQ ID NO:119, SEQ ID NO:122, or SEQ ID NO:125. In a preferred embodiment, a NEOKINE protein has an amino acid sequence at least about 60% homologous to the amino acid sequence of SEQ ID NO:116. In another preferred embodiment, a NEOKINE protein has an amino acid sequence at least about 60% homologous to the amino acid sequence of SEQ ID NO:119. In another preferred embodiment, a NEOKINE protein has an amino acid sequence at least about 60% homologous to the amino acid sequence of SEQ ID NO:122. In another preferred embodiment, a NEOKINE protein has an amino acid sequence at least about 60% homologous to the amino acid sequence of SEQ ID NO:125. In another embodiment, a NEOKINE protein has the amino acid sequence of SEQ ID NO:116, SEQ ID NO:119, SEQ ID NO:122, or SEQ ID NO:125.

[0186] Another embodiment of the invention features an isolated NEOKINE protein which is encoded by a nucleic acid molecule having a nucleotide sequence at least about 60% homologous to a nucleotide sequence of SEQ ID NO:115, or a complement thereof. Another embodiment of the invention features an isolated NEOKINE protein which is encoded by a nucleic acid molecule having a nucleotide sequence at least about 60% homologous to a nucleotide sequence of SEQ ID NO:118, or a complement thereof. Another embodiment of the invention features an isolated NEOKINE protein which is encoded by a nucleic acid molecule having a nucleotide sequence at least about 60% homologous to a nucleotide sequence of SEQ ID NO:121, or a complement thereof. Another embodiment of the invention features an isolated NEOKINE protein which is encoded by a nucleic acid molecule having a nucleotide sequence at least about 60% homologous to a nucleotide sequence of SEQ ID NO:124, or a complement thereof. This invention further features an isolated NEOKINE protein which is encoded by a nucleic acid molecule having a nucleotide sequence which hybridizes under stringent hybridization conditions to a nucleic acid molecule comprising the nucleotide sequence of SEQ ID NO:115, SEQ ID NO:118, SEQ ID NO:121, SEQ ID NO:124, or a complement thereof.

[0187] The NEOKINE proteins of the present invention, or biologically active portions thereof, can be operatively linked to a non-NEOKINE polypeptide to form NEOKINE fusion proteins. The invention further features antibodies that specifically bind NEOKINE proteins, such as monoclonal or polyclonal antibodies. In addition, the NEOKINE proteins or biologically active portions thereof can be incorporated into pharmaceutical compositions, which optionally include pharmaceutically acceptable carriers.

[0188] In another aspect, the present invention provides a method for detecting NEOKINE expression in a biological sample by contacting the biological sample with an agent capable of detecting a NEOKINE nucleic acid molecule, protein or polypeptide such that the presence of a NEOKINE nucleic acid molecule, protein or polypeptide is detected in the biological sample.

[0189] In another aspect, the present invention provides a method for detecting the presence of NEOKINE activity in a biological sample by contacting the biological sample with an agent capable of detecting an indicator of NEOKINE activity such that the presence of NEOKINE activity is detected in the biological sample.

[0190] In another aspect, the invention provides a method for modulating NEOKINE activity comprising contacting the cell with an agent that modulates NEOKINE activity such that NEOKINE activity in the cell is modulated. In one embodiment, the agent inhibits NEOKINE activity. In another embodiment, the agent stimulates NEOKINE activity. In one embodiment, the agent is an antibody that specifically binds to a NEOKINE protein. In another embodiment, the agent modulates expression of NEOKINE by modulating transcription of a NEOKINE gene or translation of a NEOKINE mRNA. In yet another embodiment, the agent is a nucleic acid molecule having a nucleotide sequence that is antisense to the coding strand of a NEOKINE mRNA or a NEOKINE gene.

[0191] In one embodiment, the methods of the present invention are used to treat a subject having a disorder characterized by aberrant NEOKINE protein or nucleic acid expression or activity by administering an agent which is a NEOKINE modulator to the subject. In one embodiment, the NEOKINE modulator is a NEOKINE protein. In another embodiment the NEOKINE modulator is a NEOKINE nucleic acid molecule. In yet another embodiment, the NEOKINE modulator is a peptide, peptidomimetic, or other small molecule. In a preferred embodiment, the disorder characterized by aberrant NEOKINE protein or nucleic acid expression is a developmental, differentiative, proliferative disorder, an immunological disorder, or cell death.

[0192] The present invention also provides a diagnostic assay for identifying the presence or absence of a genetic alteration characterized by at least one of (i) aberrant modification or mutation of a gene encoding a NEOKINEprotein; (ii) mis-regulation of said gene; and (iii) aberrant post-translational modification of a NEOKINE protein, wherein a wild-type form of said gene encodes an protein with a NEOKINEactivity.

[0193] The present invention also provides methods for identifying compounds which modulate binding of NEOKINE to the NEOKINE receptor and methods for identifying compounds which modulate the activity of the NEOKINE receptor (e.g., cell-based as well as in vitro screening assays).

### TANGO 129

[0194] The present invention is based, at least in part, on the discovery of a gene encoding T129, a transmembrane protein that is predicted to be a member of the TNF receptor superfamily. The T129 cDNA described below (SEQ ID NO:137) has a 1290 nucleotide open reading frame (nucleotides 99-1388 of SEQ ID NO:137; SEQ ID NO:139) which encodes a 430 amino acid protein (SEQ ID NO:138). This protein includes a predicted signal sequence of about 22 amino acids (from amino acid 1 to about amino acid 22 of SEQ ID NO:138) and a predicted mature protein of about 408 amino acids (from about amino acid 23 to amino acid 430 of SEQ ID NO:138; SEQ ID NO:140). T129 protein possesses a Tumor Necrosis Factor Receptor/Nerve Growth Factor Receptor (“TNFR/NGFR”) cysteine-rich region domain (amino acids 51-90; SEQ ID NO:142). T129 is predicted to have one transmembrane domain (TM) which extends from about amino acid 163 (extracellular end) to about amino acid 186 (cytoplasmic end) of SEQ ID NO:138.

[0195] The T129 molecules of the present invention are useful as modulating agents in regulating a variety of cellular processes. Accordingly, in one aspect, this invention provides isolated nucleic acid molecules encoding T129 proteins or biologically active portions thereof, as well as nucleic acid fragments suitable as primers or hybridization probes for the detection of T129-encoding nucleic acids.

[0196] The invention features a nucleic acid molecule which is at least 45% (or 55%, 65%, 75%, 85%, 95%, or 98%) identical to the nucleotide sequence shown in SEQ ID NO:137, or SEQ ID NO:139, or a complement thereof. The invention features a nucleic acid molecule which includes a fragment of at least 300 (325, 350, 375, 400, 425, 450, 500, 550, 600, 650, 700, 800, 900, 1000, or 1290) nucleotides of the nucleotide sequence shown in SEQ ID NO:137, or SEQ ID NO:139, or a complement thereof.

[0197] The invention also features a nucleic acid molecule which includes a nucleotide sequence encoding a protein having an amino acid sequence that is at least 45% (or 55%, 65%, 75%, 85%, 95%, or 98%) identical to the amino acid sequence of SEQ ID NO:138, SEQ ID NO:140. In a preferred embodiment, a T129 nucleic acid molecule has the nucleotide sequence shown SEQ ID NO:137, or SEQ ID NO:139.

[0198] Also within the invention is a nucleic acid molecule which encodes a fragment of a polypeptide having the amino acid sequence of SEQ ID NO:138 or SEQ ID NO:140, the fragment including at least 15 (25, 30, 50, 100, 150, 300, or 400) contiguous amino acids of SEQ ID NO:138 or SEQ ID NO:140.

[0199] The invention includes a nucleic acid molecule which encodes a naturally occurring allelic variant of a polypeptide comprising the amino acid sequence of SEQ ID NO:138 or SEQ ID NO:140, wherein the nucleic acid molecule hybridizes to a nucleic acid molecule comprising SEQ ID NO:137 or SEQ ID NO:139 under stringent conditions.

[0200] Also within the invention are: an isolated T129 protein having an amino acid sequence that is at least about 65%, preferably 75%, 85%, 95%, or 98% identical to the amino acid sequence of SEQ ID NO:140 (mature human T129) or the amino acid sequence of SEQ ID NO:138 (immature human T129); and an isolated T129 protein having an amino acid sequence that is at least about 85%, 95%, or 98% identical to the TNFR/NGFR cysteine-rich domain of SEQ ID NO:138 (e.g., about amino acid residues 51 to 90 of SEQ ID NO:138; SEQ ID NO:142).

[0201] Also within the invention are: an isolated T129 protein which is encoded by a nucleic acid molecule having a nucleotide sequence that is at least about 65%, preferably 75%, 85%, or 95% identical to SEQ ID NO:139; an isolated T129 protein which is encoded by a nucleic acid molecule having a nucleotide sequence at least about 65% preferably 75%, 85%, or 95% identical the TNFR/NGFR cysteine-rich domain encoding portion of SEQ ID NO:137 (e.g., about nucleotides 248 to 368 of SEQ ID NO:137); and an isolated T129 protein which is encoded by a nucleic acid molecule having a nucleotide sequence which hybridizes under stringent hybridization conditions to a nucleic acid molecule having the nucleotide sequence of SEQ ID NO:139.

[0202] Also within the invention is a polypeptide which is a naturally occurring allelic variant of a polypeptide that includes the amino acid sequence of SEQ ID NO:138 or SEQ ID NO:140, wherein the polypeptide is encoded by a nucleic acid molecule which hybridizes to a nucleic acid molecule comprising SEQ ID NO:137 or SEQ ID NO:139 under stringent conditions.

[0203] Another embodiment of the invention features T129 nucleic acid molecules which specifically detect T129 nucleic acid molecules relative to nucleic acid molecules encoding other members of the TNF receptor superfamily. For example, in one embodiment, a T129 nucleic acid molecule hybridizes under stringent conditions to a nucleic acid molecule comprising the nucleotide sequence of SEQ ID NO:137, SEQ ID NO:139, or a complement thereof. In another embodiment, the T129 nucleic acid molecule is at least 300 (325, 350, 375, 400, 425, 450, 500, 550, 600, 650, 700, 800, 900, 1000, or 1290) nucleotides in length and hybridizes under stringent conditions to a nucleic acid molecule comprising the nucleotide sequence shown in SEQ ID NO:137, SEQ ID NO:139, or a complement thereof. In a preferred embodiment, an isolated T129 nucleic acid molecule comprises nucleotides 248 to 368 of SEQ ID NO:137, encoding the TNFR/NGFR cysteine-rich domain of T129, or a complement thereof. In another embodiment, the invention provides an isolated nucleic acid molecule which is antisense to the coding strand of a T129 nucleic acid.

[0204] Another aspect of the invention provides a vector, e.g., a recombinant expression vector, comprising a T129 nucleic acid molecule of the invention. In another embodiment the invention provides a host cell containing such a vector. The invention also provides a method for producing T129 protein by culturing, in a suitable medium, a host cell of the invention containing a recombinant expression vector such that a T129 protein is produced.

[0205] Another aspect of this invention features isolated or recombinant T129 proteins and polypeptides. Preferred T129 proteins and polypeptides possess at least one biological activity possessed by naturally occurring human T129, e.g., (1) the ability to form protein:protein interactions with proteins in the T129 signalling pathway; (2) the ability to bind T129 ligand; (3) the ability to bind to an intracellular target. Other activities include: (1) modulation of cellular proliferation and (2) modulation of cellular differentiation. In one embodiment, an isolated T129 protein has a TNFR/NGFR cysteine-rich domain and lacks both a transmembrane and a cytoplasmic domain. In another embodiment the T129 polypeptide lacks both a transmembrane domain and a cytoplasmic domain and is soluble under physiological conditions.

[0206] The T129 proteins of the present invention, or biologically active portions thereof, can be operatively linked to a non-T129 polypeptide (e.g., heterologous amino acid sequences) to form T129 fusion proteins. The invention further features antibodies that specifically bind T129 proteins, such as monoclonal or polyclonal antibodies. In addition, the T129 proteins or biologically active portions thereof can be incorporated into pharmaceutical compositions, which optionally include pharmaceutically acceptable carriers.

[0207] In another aspect, the present invention provides a method for detecting the presence of T129 activity or expression in a biological sample by contacting the biological sample with an agent capable of detecting an indicator of T129 activity such that the presence of T129 activity is detected in the biological sample.

[0208] In another aspect, the invention provides a method for modulating T129 activity comprising contacting a cell with an agent that modulates (inhibits or stimulates) T129 activity or expression such that T129 activity or expression in the cell is modulated. In one embodiment, the agent is an antibody that specifically binds to T129 protein. In another embodiment, the agent modulates expression of T129 by modulating transcription of a T129 gene, splicing of a T129 mRNA, or translation of a T129 mRNA. In yet another embodiment, the agent is a nucleic acid molecule having a nucleotide sequence that is antisense to the coding strand of the T129 mRNA or the T129 gene.

[0209] In one embodiment, the methods of the present invention are used to treat a subject having a disorder characterized by aberrant T129 protein or nucleic acid expression or activity by administering an agent which is a T129 modulator to the subject. In one embodiment, the T129 modulator is a T129 protein. In another embodiment the T129 modulator is a T129 nucleic acid molecule. In other embodiments, the T129 modulator is a peptide, peptidomimetic, or other small molecule. In a preferred embodiment, the disorder characterized by aberrant T129 protein or nucleic acid expression is a proliferative or differentiative disorder, particularly of the immune system. The present invention also provides a diagnostic assay for identifying the presence or absence of a genetic lesion or mutation characterized by at least one of: (i) aberrant modification or mutation of a gene encoding a T129 protein; (ii) mis-regulation of a gene encoding a T129 protein; and (iii) aberrant post-translational modification of a T129 protein, wherein a wild-type form of the gene encodes a protein with a T129 activity.

[0210] In another aspect, the invention provides a method for identifying a compound that binds to or modulates the activity of a T129 protein. In general, such methods entail measuring a biological activity of a T129 protein in the presence and absence of a test compound and identifying those compounds which alter the activity of the T129 protein.

[0211] The invention also features methods for identifying a compound which modulates the expression of T129 by measuring the expression of T129 in the presence and absence of a compound.

### A259 (Integrin Alpha Subunit)

[0212] This invention provides novel human and murine nucleic acid molecules which encode proteins referred to herein as A259 proteins, which are novel integrin α subunits. These proteins, fragments, derivatives, and variants thereof are collectively referred to herein as “polypeptides of the invention” or “proteins of the invention”. Nucleic acid molecules encoding the polypeptides or proteins of the invention are collectively referred to as “nucleic acids of the invention”.

[0213] The A259 proteins are homologous to the α subunits of the integrin family, and in particular, to the α10 and α1 subunits of the integrin family.

[0214] The nucleic acids and polypeptides of the present invention are useful as modulating agents in regulating a variety of cellular processes. Accordingly, in one aspect, this invention provides isolated nucleic acid molecules encoding a polypeptide of the invention or a biologically active portion thereof. The present invention also provides nucleic acid molecules which are suitable for use as primers or hybridization probes for the detection of nucleic acids encoding a polypeptide of the invention.

[0215] The invention features nucleic acid molecules which are at least 47% (or 50%, 55%, 60%, 65%, 70%, 75%, 80%, 85%, 90%, 95%, or 98%) identical to the nucleotide sequence of SEQ ID NO:145, SEQ ID NO:163, the nucleotide sequence of the cDNA insert of a clone deposited with ATCC as Accession Number 207190 or 207191, or a complement thereof.

[0216] The invention features nucleic acid molecules which are at least 56% (or 57%, 58%, 59%, 60%, 65%, 70%, 75%, 80%, 85%, 90%, 95%, or 98%) identical to the nucleotide sequence of SEQ ID NO:146, SEQ ID NO:164, the nucleotide sequence of the cDNA insert of a clone deposited with ATCC as Accession Number 207190 or 207191, or a complement thereof.

[0217] The invention features nucleic acid molecules which include a fragment of at least 390 (400, 500, 600, 800, 1000, 1250, 1500, 1750, 2000, 2250, 2500, 2750, 3000, 3250, 3500, 3750, 4000, 4250, 4500, 4750, 5000, 5025, or 5042) nucleotides of the nucleotide sequence of SEQ ID NO:145, SEQ ID NO:163, the nucleotide sequence of the cDNA of ATCC Accession Number 207190 or 207191, or a complement thereof.

[0218] The invention also features nucleic acid molecules which include a nucleotide sequence encoding a protein having an amino acid sequence that is at least 44% (or 45%, 50%, 55%, 60%, 65%, 75%, 85%, 95%, or 98%) identical to the amino acid sequence of SEQ ID NO:147, SEQ ID NO:165, the amino acid sequence encoded by the cDNA of ATCC Accession Number 207190 or 207191, or a complement thereof.

[0219] In preferred embodiments, the nucleic acid molecules have the nucleotide sequence of SEQ ID NO:145, 146, 163, 164, or the nucleotide sequence of the cDNA of ATCC Accession Number 207190 or 207191.

[0220] Also within the invention are nucleic acid molecules which encode a fragment of a polypeptide having the amino acid sequence of SEQ ID NO:147, SEQ ID NO:165, or a fragment including at least 15 (25, 30, 50, 75, 100, 150, 200, 250, 300, 350, 400, 450, 500, 550, 600, 650, 700, 750, 800, 850, 900, 950, 1000, 1050, 1100, 1150, 1170, 1180, or 1188) contiguous amino acids of SEQ ID NO:147, SEQ ID NO:165, or the amino acid sequence encoded by the cDNA of ATCC Accession Number 207190 or 207191.

[0221] The invention includes nucleic acid molecules which encode a naturally occurring allelic variant of a polypeptide comprising the amino acid sequence of SEQ ID NO:147, SEQ ID NO:165, or the amino acid sequence encoded by the cDNA of ATCC Accession Number 207190 or 207191, wherein the nucleic acid molecule hybridizes to a nucleic acid molecule consisting of a nucleic acid sequence encoding SEQ ID NO:147, SEQ ID NO:165, the amino acid sequence encoded by the cDNA of ATCC Accession Number 207190 or 207191, or a complement thereof under stringent conditions.

[0222] Also within the invention are isolated polypeptides or proteins having an amino acid sequence that is at least about 44%, preferably 45%, 50%, 55%, 60%, 65%, 75%, 85%, 95%, or 98% identical to the amino acid sequence of SEQ ID NO:147, SEQ ID NO:165, or the amino acid sequence encoded by the cDNA of ATCC Accession Number 207190 or 207191.

[0223] Also within the invention are isolated polypeptides or proteins which are encoded by a nucleic acid molecule having a nucleotide sequence that is at least about 56%, preferably 57%, 58%, 59%, 60%, 65%, 70%, 75%, 80%, 85%, 90%, 95%, or 98% identical to the nucleic acid sequence encoding SEQ ID NO:147, SEQ ID NO:165, and isolated polypeptides or proteins which are encoded by a nucleic acid molecule having a nucleotide sequence which hybridizes under stringent hybridization conditions to a nucleic acid molecule having the nucleotide sequence of SEQ ID NO:145, 146, 163, or 164, a complement thereof, or the non-coding strand of the cDNA of ATCC Accession Number 207190 or 207191.

[0224] Also within the invention are polypeptides which are naturally occurring allelic variants of a polypeptide that includes the amino acid sequence of SEQ ID NO:147, or the amino acid sequence encoded by the cDNA of ATCC Accession Number 207190 or 207191, wherein the polypeptide is encoded by a nucleic acid molecule which hybridizes to a nucleic acid molecule having the sequence of SEQ ID NO:145, 146, 163, 164, or a complement thereof under stringent conditions.

[0225] The invention also features nucleic acid molecules that hybridize under stringent conditions to a nucleic acid molecule having the nucleotide sequence of SEQ ID NO:145, 146, 163, or 164, the cDNA of ATCC Accession Number 207190 or 207191, or a complement thereof. In other embodiments, the nucleic acid molecules are at least 390 (400, 500, 600, 800, 1000, 1250, 1500, 1750, 2000, 2250, 2500, 2750, 3000, 3250, 3500, 3750, 4000, 4250, 4500, 4750, 5000, 5025, or 5042) nucleotides in length and hybridize under stringent conditions to a nucleic acid molecule comprising the nucleotide sequence of SEQ ID NO:145, 146, 163, or 164, the cDNA of ATCC Accession Number 207190 or 207191, or a complement thereof.

[0226] In one embodiment, the invention provides an isolated nucleic acid molecule which is antisense to the coding strand of a nucleic acid of the invention.

[0227] Another aspect of the invention provides vectors, e.g., recombinant expression vectors, comprising a nucleic acid molecule of the invention. In another embodiment, the invention provides host cells containing such a vector or a nucleic acid molecule of the invention. The invention also provides methods for producing a polypeptide of the invention by culturing, in a suitable medium, a host cell of the invention containing a recombinant expression vector such that a polypeptide is produced.

[0228] Another aspect of this invention features isolated or recombinant proteins and polypeptides of the invention. Preferred proteins and polypeptides possess at least one biological activity possessed by the corresponding naturally-occurring human polypeptide. An activity, a biological activity, or a functional activity of a polypeptide or nucleic acid of the invention refers to an activity exerted by a protein, polypeptide or nucleic acid molecule of the invention on a responsive cell as determined in vivo, or in vitro, according to standard techniques. Such activities can be a direct activity, such as an association with or an enzymatic activity on a second protein, or an indirect activity, such as a cellular signaling activity mediated by interaction of the protein with a second protein.

[0229] A259 biological activities include, e.g., (1) the ability to form protein-protein interactions with proteins in the signaling pathway of the naturally-occurring polypeptide; (2) the ability to bind a ligand of the naturally-occurring polypeptide; (3) the ability to interact with an A259 ligand; and (4) the ability to modulate function, survival, morphology, migration, proliferation and/or differentiation of cells, e.g., of tissues in which it is expressed (e.g., osteoblasts, bone marrow, neural tissue).

[0230] A259 biological activities also include, e.g., (1) the ability to modulate, e.g., stabilize, protein-protein interactions (e.g., homophilic and/or heterophilic), and protein-ligand interactions, e.g., in receptor-ligand recognition; (2) ability to modulate signalling pathways; (3) ability to modulate cell-cell interactions, e.g., by acting as a cell-cell adhesion molecule, or by acting as a receptor for cell-cell adhesion molecules; (4) the ability to modulate interactions between cells and proteins (e.g., extracellular matrix proteins, e.g., collagens, fibrinogens, laminins, and fibronectin), e.g., by acting as a cell surface receptor; (5) the ability to interact, e.g., noncovalently interact, with an integrin β subunit; and (6) the ability to exhibit an activity of an integrin α10 or an integrin α1 subunit.

[0231] Still other A259 biological activities include, e.g., (1) the ability to modulate, e.g., initiate, an immune response, e.g., an inflammatory response; (2) the ability to modulate, e.g., initiate wound healing, e.g., by modulating platelet aggregation or by modulating fibroblast attachment to wound sites during wound contraction; and (3) the ability to stimulate fibrogenesis.

[0232] In one embodiment, a polypeptide of the invention has an amino acid sequence sufficiently identical to an identified domain of a polypeptide of the invention. As used herein, the term “sufficiently identical” refers to a first amino acid or nucleotide sequence which contains a sufficient or minimum number of identical or equivalent (e.g., with a similar side chain) amino acid residues or nucleotides to a second amino acid or nucleotide sequence such that the first and second amino acid or nucleotide sequences have a common structural domain and/or common functional activity. For example, amino acid or nucleotide sequences which contain a common structural domain having about 60% identity, preferably 65% identity, more preferably 75%, 85%, 95%, 98% or more identity are defined herein as sufficiently identical.

[0233] In one embodiment, an A259 protein includes at least one or more of the following domains: a signal sequence, an extracellular domain, a repeat domain, an I domain, an intergrin alpha repeat domain, a transmembrane domain, and a cytoplasmic domain. In yet another embodiment, an A259 protein includes an extracellular domain and one or more repeat domains, and or one or more integrin alpha repeat domains, and is a soluble protein. In still another embodiment, an A259 protein includes an extracellular domain, one or more repeat domains, a transmembrane domain, a cytoplasmic domain, and is a receptor protein.

[0234] The polypeptides of the present invention, or biologically active portions thereof, can be operably linked to a heterologous amino acid sequence to form fusion proteins. The invention further features antibodies that specifically bind a polypeptide of the invention such as monoclonal or polyclonal antibodies. In addition, the polypeptides of the invention or biologically active portions thereof can be incorporated into pharmaceutical compositions, which optionally include pharmaceutically acceptable carriers.

[0235] In another aspect, the present invention provides methods for detecting the presence of the activity or expression of a polypeptide of the invention in a biological sample by contacting the biological sample with an agent capable of detecting an indicator of activity such that the presence of activity is detected in the biological sample.

[0236] In another aspect, the invention provides methods for modulating activity of a polypeptide of the invention comprising contacting a cell with an agent that modulates (inhibits or stimulates) the activity or expression of a polypeptide of the invention such that activity or expression in the cell is modulated. In one embodiment, the agent is an antibody that specifically binds to a polypeptide of the invention.

[0237] In another embodiment, the agent modulates expression of a polypeptide of the invention by modulating transcription, splicing, or translation of an mRNA encoding a polypeptide of the invention. In yet another embodiment, the agent is a nucleic acid molecule having a nucleotide sequence that is antisense to the coding strand of an mRNA encoding a polypeptide of the invention.

[0238] The present invention also provides methods to treat a subject having a disorder characterized by aberrant activity of a polypeptide of the invention or aberrant expression of a nucleic acid of the invention by administering an agent which is a modulator of the activity of a polypeptide of the invention or a modulator of the expression of a nucleic acid of the invention to the subject. In one embodiment, the modulator is a protein of the invention. In another embodiment, the modulator is a nucleic acid of the invention. In other embodiments, the modulator is a peptide, peptidomimetic, or other small molecule.

[0239] The present invention also provides diagnostic assays for identifying the presence or absence of a genetic lesion or mutation characterized by at least one of: (i) aberrant modification or mutation of a gene encoding a polypeptide of the invention, (ii) mis-regulation of a gene encoding a polypeptide of the invention, and (iii) aberrant post-translational modification of the invention wherein a wild-type form of the gene encodes a protein having the activity of the polypeptide of the invention.

[0240] In another aspect, the invention provides a method for identifying a compound that binds to or modulates the activity of a polypeptide of the invention. In general, such methods entail measuring a biological activity of the polypeptide in the presence and absence of a test compound and identifying those compounds which alter the activity of the polypeptide.

[0241] The invention also features methods for identifying a compound which modulates the expression of a polypeptide or nucleic acid of the invention by measuring the expression of the polypeptide or nucleic acid in the presence and absence of the compound

### BRIEF DESCRIPTION OF THE DRAWINGS

[0242] FIG. 1 is a series of sequence comparisons between portions of the amino acid sequence of T85 and a fibronectin type III domain (PFOOO41) and an Ig superfamily domain (PF00047) derived from a hidden Markov model.

[0243] FIGS. 2A-D depict a comparison of the amino acid sequence of T85 and human Robo protein.

[0244] FIG. 3 depicts an alignment of an amino acid sequence of Tango-77 (T77; SEQ ID NO:2) with IL1RA (SEQ ID NO:14), and IL-1β (SEQ ID NO:15).

[0245] FIG. 4 depicts an alignment of the amino acid sequence of murine SPOIL-I (also referred to as murine or mTANGO 080-1) (corresponding amino acids 1 to 98 of SEQ ID NO:2), murine IL-1ra (Swissprot™ Accession Number P25085) (SEQ ID NO:10), murine IL-1α (Swissprot™ Accession Number P01582) (SEQ ID NO:11) and murine IL-1β (Swissprot™ Accession Number P10749) (SEQ ID NO:12).

[0246] FIGS. 5A-D depict pairwise alignments of SPOIL amino acid sequences of the present invention. FIG. 5A depicts an alignment of human SPOIL-I with human SPOIL-II. FIG. 5B depicts an alignment of murine SPOIL-I with murine SPOIL-II. FIG. 5C depicts an alignment human SPOIL-I with murine SPOIL-I. FIG. 5D depicts an alignment of human SPOIL-II with murine SPOIL-II. The alignments were generated using the ALIGN algorithm (Myers and Miller (1989) CABIOS). Gap penalties were set at −12/−4 and a PAM120 residue weight matrix was used.

[0247] FIG. 6 depicts a multiple sequence alignment of the amino acid sequence of murine SPOIL-I (corresponding to SEQ ID NO:2), the amino acid sequence of murine SPOIL-II (corresponding to SEQ ID NO:25), the amino acid sequence of human SPOIL-I (corresponding to SEQ ID NO:14), and the amino acid sequence of human SPOIL-II (corresponding to SEQ ID NO:18). Asterisks indicate amino acid residues that are conserved between SPOIL family members.

[0248] FIG. 7 depicts a multiple sequence alignment of the amino acid sequence of murine IL-1α (Swissprot™ Accession Number P01582) (SEQ ID NO:11), murine IL-1β (Swissprot™ Accession Number P10749) (SEQ ID NO:12), murine IL-1β (Swissprot™ Accession Number P25085) (SEQ ID NO:10), the amino acid sequence of murine SPOIL-I (also referred to as murine or mTANGO 080-I) (corresponding amino acids 1 to 98 of SEQ ID NO:2), the amino acid sequence of murine SPOIL-II (also referred to as murine or mTANGO 080-II) (corresponding amino acids 1 to 160 of SEQ ID NO:25), the amino acid sequence of human SPOIL-I (corresponding nucleotides 1 to 169 of SEQ ID NO:14), and the amino acid sequence of human SPOIL-II (corresponding to nucleotides 1 to 208 of SEQ ID NO:16). Asterisks indicate amino acid residues that are conserved between SPOIL proteins and IL-1ra.

[0249] FIG. 8 is a diagram depicting the relationship between the NEOKINE proteins of the instant invention. The figure depicts the functional domains of the NEOKINE family members, human NEOKINE-1 (SEQ ID NO:2), mouse NEOKINE-1 (SEQ ID NO:5), rat NEOKINE-1 (SEQ ID NO:8), and macaque NEOKINE-1 (SEQ ID NO:21). The NEOKINE CXC signature motifs are indicated in italics. The conserved cysteine residues are indicated with asterisks.

[0250] FIG. 9 is a hydropathy plot of T129. The location of the predicted transmembrane (TM), cytoplasmic (IN), and extracellular (OUT) domains are indicated as are the position of cysteines (cys; vertical bars immediately below the plot). Relative hydrophilicity is shown above the dotted line, and relative hydrophobicity is shown below the dotted line.

[0251] FIG. 10 depicts a hydropathy plot of human A259. Relatively hydrophobic regions of the protein are above the dashed horizontal line, and relatively hydrophilic regions of the protein are below the dashed horizontal line. The cysteine residues (cys) and potential N-glycosylation sites (Ngly) are indicated by short vertical lines just below the hydropathy trace. The dashed vertical line separates the signal sequence (amino acids 1 to 22 of SEQ ID NO:3; SEQ ID NO:5) on the left from the mature protein (amino acids 23 to 1188 of SEQ ID NO:3; SEQ ID NO:4) on the right. Thicker gray horizontal bars below the dashed horizontal line indicate extracellular (“out”), transmembrane (“TM”), and intracellular (“in”) regions of the molecule.

[0252] FIG. 11 depicts a hydropathy plot of murine A259. Relatively hydrophobic regions of the protein are above the dashed horizontal line, and relatively hydrophilic regions of the protein are below the dashed horizontal line. The cysteine residues (cys) and potential N-glycosylation sites (Ngly) are indicated by short vertical lines just below the hydropathy trace. The dashed vertical line separates the signal sequence (amino acids 1 to 22 of SEQ ID NO:21; SEQ ID NO:23) on the left from the mature protein (amino acids 23 to 1188 of SEQ ID NO:21; SEQ ID NO:22) on the right. Thicker gray horizontal bars below the dashed horizontal line indicate extracellular (“out”), transmembrane (“TM”), and intracellular (“in”) regions of the molecule.

[0253] FIG. 12A depicts an alignment of amino acids 37-90 of human A259 (SEQ ID NO:35) with a consensus integrin alpha repeat domain derived from a hidden Markov model (SEQ ID NO:40).

[0254] FIG. 12B depicts an alignment of amino acids 421-472 of human A259 (SEQ ID NO:36) with a consensus integrin alpha repeat domain derived from a hidden Markov (SEQ ID NO:40).

[0255] FIG. 12C depicts an alignment of amino acids 476-532 of human A259 (SEQ ID NO:37) with a consensus integrin alpha repeat domain derived from a hidden Markov model (SEQ ID NO:40).

[0256] FIG. 12D depicts an alignment of amino acids 538-593 of human A259 (SEQ ID NO:38) with a consensus integrin alpha repeat domain derived from a hidden Markov model (SEQ ID NO:40).

[0257] FIG. 12E depicts an alignment of amino acids 600-654 of human A259 (SEQ ID NO:39) with a consensus integrin alpha repeat domain derived from a hidden Markov model (SEQ ID NO:40).

[0258] FIG. 13A is a graph depicting the results of an analysis of A259 expression in three normal liver clinical samples (A, B, and C) and eight liver fibrosis clinical samples (D, E, F, G, H, I, J, and K).

[0259] FIG. 13B is a graph depicting the results an analysis of human A259 expression in a variety of cells: heart (A), lung (B), liver (C), passaged stellate cells (D), quiescent stellate cells (E), srellate cells (F) stellate/F BS cells (G), NHDF fibroblasts (H); TGF-treated NHDF fibroblasts (I); NHLF fibroblasts (J); and TGF-treated NHLF fibroblasts (K).

### DETAILED DESCRIPTION OF THE INVENTION

### Delta 3

[0260] Notch, first identified in Drosophila, is the founding member of a family of transmembrane receptor proteins that mediate cell responses to intrinsic and/or extrinsic developmental cues. The cellular response to Notch signaling can be differentiation, proliferation and/or apoptosis depending on the specific developmental program. Defects in the Notch signaling pathway may be involved in neurological, vascular and hematologic diseases.

[0261] Analysis of gene expression patterns for Notch and its ligands has indicated that Notch signaling may have a role in hematopoiesis (Milner and Bigas (1999) Blood 93:2431). Notch-1 was also shown to be involved in determination of T-cell education and fate in the thymus (Robey (1999) An Rev Immunol 17:283). Furthermore, a subset of human T-cell leukemia patients harbor a translocation involving the Notch 1 gene which results in a constitutively active Notch protein (Ellisen et al. (1991) Cell 66:649). Compelling evidence that the Notch signaling pathway is involved in B-cell development is seen in B-cell malignancies induced by Epstein-Barr virus (EBV). EBNA2, the transforming protein of EBV, transactivates cellular genes by direct interaction with a primary component of the Notch pathway (Henkel et al. (1994) Science 265:92).

[0262] It has recently been shown that the human Notch3 gene, located on chromosome 19, is mutated in CADASIL patients (Joutel et al., (1996) Nature 383: 707-710). CADASIL causes a type of stroke and dementia whose key features include recurrent subcortical ischemic events, progressive vascular dementia, craniofacial paralysis, migraine and mood disorders with severe depression (Chabriat et al., (1995) Lancet 346: 934-939). Pathological examination reveals multiple small, deep cerebral infarcts, a leukoencephalopathy and a non-atherosclerotic, non-amyloid angiopathy involving mainly the small cerebral arteries (Baudrimont et al., (1993) Stroke 24: 122-125). Severe alterations of vascular smooth muscle cells are evident on ultrastructural analysis (Ruchoux et al., (1995) Acta. Neuropathol. 89:500-512). Therefore, disruption of the Notch signaling pathway appears to be responsible for CADASIL stroke and dementia. Defects in the Notch signaling pathway may also be involved in other neurological diseases, e.g., Alzheimer's disease.

[0263] The Notch signaling pathway comprises Notch proteins, which are membrane proteins, and proteins interacting with Notch proteins, termed Delta proteins. The product of the Delta gene, acting as a ligand, and that of the Notch gene, acting as a receptor, are key components in a lateral-inhibition signaling pathway that regulates the detailed patterning of many different tissues in Drosophila (Vassin et al., (1987) EMBO J. 6:3431-3440; Kopczynski et al., (1988) Genes Dev. 2:1723-1735; Fehon et al., (1990) Cell 61:523-534; Artavanis-Tsakonas et al., (1991) Trends, Genet. Sci. 7:403-407; Heitzler et al., (1991) Cell 64: 1083-1092; Greenwald et al., (1992) Cell 68: 271-281; Fortini et al., (1993) Cell 75: 124501247; and Muskavitch (1994) Devl. Biol. 166:415-430). During neurogenesis in particular, neural precursors, by expressing Delta, inhibit neighboring Notch-expressing cells from becoming committed to a neural fate. Mutations leading to a failure of lateral inhibition cause an overproduction of neurons, giving rise to a phenotype termed the “neurogenic phenotype” in Drosophila. For example, loss of Notch1 leads to somite defects and embryonic death in mice, whereas constitutively active mutant forms of Notch1 appear to inhibit cell differentiation in Xenopus and in cultured mammalian cells (Swiatek et al. (1994) Genes Dev. 8:707; Conlon et al. (1995) J. Development 121:1533; Lopan et al. (1994) Development 120:2385; and Nye et al. (1994) Development 120:2421). Furthermore, loss of DII1 function in mice leads to excessive neuronal differentiation, resulting in severe patterning defects in the paraxial mesoderm and a hyperplastic central nervous system (CNS) (Hrabe de Angelis et al. (1997) Nature 386:717). Thus, the Notch signaling pathway, in particular Delta proteins, mediate lateral inhibition during neurogenesis so that only a limited proportion of cells having the potential to become neurons will in fact differentiate into neurons.

[0264] The Notch family of proteins are transmembrane receptors containing several conserved peptide motifs. The extracellular domains contain many tandemly repeated copies of an epidermal growth factor (EGF) like motif. The intracellular domains contain six copies of another conserved motif, termed the Cdc10/ankyrin repeat.

[0265] A protein interacting with Notch was first discovered in Drosophila and has been called Delta protein. This protein encodes a transmembrane protein ligand, which contains tandem arrays of epidermal growth factor-like repeats in the extracellular domain. The Delta and Notch proteins can directly bind to each other and specific EGF-like domains are sufficient and necessary for this binding (Fehon et al., (1990) Cell 61:523-534; Rebay et al., (1991) Cell 67:687-699; and Lieber et al., (1992) Neuron 9: 847-859).

[0266] It is also possible that soluble forms of the protein also exist. Such soluble isoforms can arise through variable splicing of the Delta3 gene or alternatively as a result of proteolysis of a membranous isoform. In fact, a splice variant of a chicken Delta protein have been described in PCT Publication No. WO 97/01571 (Jan. 16, 1997). Furthermore, the human Delta-like polypeptide Dlk is a soluble protein (Jansen et al. (1994) Eur. J. Biochem. 225:83-92).

[0267] In addition to the Drosophila Delta protein, a chick Delta ortholog, C-Delta protein (Henrique et al., (1995) Nature 375: 787-790 and GenBank Accession No. U26590) two Xenopus orthologs, X-Delta-1 and X-Delta-2 (Chitnis et al., (1995) Nature 375:761-766 and GenBank Accession Nos. L42229 and U70843), a mouse ortholog (GenBank Accession No. X80903), a delta-like human gene 1(Dlk) (Bettenhausen et al., (1995) Development 121:2407-2418) a rat ortholog (GenBank Accession No. U78889), and a Zebrafish ortholog (GenBank Accession No. Y11760) have been identified.

[0268] The present invention is based at least in part on the discovery of a novel gene encoding a human Delta protein referred to herein as “hDelta3” polypeptide, and the mouse equivalent referred to herein as “mDelta3”. An exemplary hDelta3 has been deposited with the ATCC® on Mar. 5, 1997 and has been assigned ATCC® GenBank Accession Number 98348. The human Delta3 gene maps to human chromosome 15.

[0269] The DNA sequence of human Delta3 including 5′ and 3′ non-coding sequences is shown in SEQ ID NO:1, the coding sequence is shown in SEQ ID NO:3, and the deduced amino acid sequence of the human Delta3 protein is shown in SEQ ID NO: 2. The DNA sequence of mouse Delta3 including 5′ and 3′ non-coding sequences is shown in SEQ ID NO:24 and the coding sequence is shown in SEQ ID NO:26. The deduced amino acid sequence of the mouse Delta3 protein is shown in SEQ ID NO:25.

[0270] Human Delta3 is expressed in endothelial cells and in fact was cloned from a human microvascular endothelial cell library. Northern blot analysis of RNA prepared from a number of different human tissues, indicate that a 3.5 kb Delta3 mRNA transcript is present in fetal brain, lung, liver and kidney, and adult heart, placenta, lung, skeletal muscle, kidney, pancreas, spleen, thymus, prostate, testis, ovary, small intestine and colon. Low levels of Delta3 mRNA were also detected in adult brain and adult liver. However, no Delta3 mRNA was detected in peripheral blood leukocytes. These results indicate that Delta3 is expressed in a tissue-specific manner. Further, expression in human microvascular endothelial cells was found to be up-regulated (about 2-3 fold) in cells that had been stimulated with certain growth factors (e.g., basic fibroblast growth factor (bFGF) or vascular endothelial growth factor (VEGF)). In addition, strong expression of human Delta3 was observed in the colorectal carcinoma cell line, SW480. Furthermore, expression of hDelta3 has been shown to be induced in response to proliferation and differentiation signals (See Examples). Thus, the Delta3 gene, in particular, the hDelta3 gene, is a gene whose expression in a cell changes with the state of proliferative and/or differentiative state of cells.

[0271] In situ hybridization was performed on a wide range of murine adult and embryonic tissues using a probe complementary to mRNA of mDelta3. Expression was most abundant and widespread during embryogenesis. Strongest expression was observed in the eye of all the embryonic ages tested. Signal in a pattern suggestive of neuronal expression was not observed in any other tissues making the expression in the eye unique. Ubiquitous expression was also detected in lung, thymus and brown fat during embryogenesis. A multifocal, scattered signal was also observed throughout the embryo. This signal pattern was more focused in the cortical region of the kidney and outlining the intestinal tract. Adult expression was highest in the ovary and the cortical regions of the kidney and adrenal gland. This is consistent with Delta3's role as a regulator of cell growth and/or differentiation.

[0272] As predicted from the nucleotide sequence of the nucleic acid encoding hDelta3, the novel, full-length hDelta3 polypeptide comprises 685 amino acids and is similar and structure to Delta proteins obtained from other organisms (discussed below). An amino acid sequence analysis of Delta3 proteins predicts that the protein comprises at least the structural domains described herein. First, human and mouse Delta3 have a signal peptide, corresponding to amino acid 1 to amino acid 16, amino acid 1 to amino acid 17, amino acid 1 to amino acid 18, amino acid 1 to amino acid 19 or amino acid 1 to amino acid 20 of SEQ ID NOs: 2 or 25. The signal sequence is normally cleaved during processing of the mature protein. In such embodiments of the invention, the domains and the mature protein resulting from cleavage of such signal peptides are also included herein. For example, the cleavage of a signal sequence consisting of amino acids 1 to 17 results in an extracellular domain consisting of amino acids 18 to 529 of SEQ ID No 0.2 and the mature Delta3 polypeptide corresponding to amino acids 18 to 685 of SEQ ID NO: 2.

[0273] Second, human and mouse Delta3 have protein interaction domains such as a Delta Serrated lag-2 (DSL) motif corresponding to amino acid 173 to amino acid 217 of SEQ ID NO: 2 and amino acid 174 to amino acid 218 of SEQ ID NO: 25, as well as eight epidermal growth factor (EGF)-like repeats.

[0274] In addition, Delta3 proteins have a transmembrane domain, i.e., in human Delta3 the transmembrane domain corresponds to about amino acid 530 to about amino acid 553 of SEQ ID NO: 2, and in mouse Delta3, amino acid 531 to amino acid 554 of SEQ ID NO: 25. Delta3 proteins have also have a cytoplasmic domain corresponding to about amino acid 554 to about amino acid 685 of SEQ ID NO: 2 or amino acid 555 to amino acid 686 of SEQ ID NO: 25. Accordingly, sequence analysis for conserved domains of Delta3 amino acid sequence shows that the protein is likely a transmembrane protein having an extracellular domain corresponding to about amino acid 1 to about amino acid 529 of SEQ ID NO:2, about amino acid 18 to about amino acid 529 of SEQ ID NO: 2, amino acid 1 to about amino acid 530 of SEQ ID NO: 25, or amino acid 18 to 530 of SEQ ID NO: 25, said extracellular domain comprising a DSL motif and eight EGF-like domains. The Delta3 protein further comprises a transmembrane domain and a cytoplasmic domain.

[0275] Human Delta3 protein is similar in structure and in sequence to the Delta proteins identified in Drosophila, Xenopus, zebrafish, chicken, rat, mouse, rat, and human. Applicants have aligned known Delta proteins with the Delta3 protein of the present invention. This alignment contains the following Delta proteins: a mouse Delta1 protein (m-delta1), rat Delta-1 protein (r-delta1), a human Delta-1 protein (h-delta1), a Xenopus Delta1 protein (x-delta1), a chicken Delta1 protein (c-delta1), a zebrafish Delta1 protein (z-delta1), a second Xenopus Delta protein (x-delta2), as well as the human Delta3 protein (h-delta3), and a Drosophila Delta1 protein (d-delta). The amino acid sequence of h-delta1 is the amino acid sequence published in PCT Publication WO 97/01571 (Jan. 16, 1997) which is incomplete and contains numerous errors, as stated in the application. Since the amino acid sequence alignment has been done using the pileup computer program (GCG Package), the order of the amino acid sequences reflects the relative identity between the different Delta proteins. Accordingly, the Drosophila protein, which corresponds to the bottom sequence in the alignment is most distant from the other Delta proteins.

[0276] The alignment shows that hDelta3, which is listed second to the last, is the second most distant Delta protein from the previously identified mouse, rat, human, Xenopus, zebrafish, and chicken delta protein. Accordingly, hDelta3 protein is significantly different from the previously described human Delta protein, as well as the Delta proteins from the other species. Interestingly, the hDelta3 protein has an amino acid sequence which is equally distant from both Xenopus proteins, i.e., Delta1 and Delta2, suggesting that hDelta3 does not correspond to either of the Xenopus Delta proteins. Therefore, the newly isolated polypeptide has been termed hDelta3 and the previously identified mouse, rat, human, zebrafish, and Xenopus Delta proteins are termed Delta1 proteins herein and the two Xenopus proteins are termed Delta1 and Delta2 proteins. The difference between hDelta3 protein and previously isolated Delta proteins can also be visualized by comparing the percentage similarity or identity between hDelta3 and the previously identified Delta1 and Delta2 proteins on one hand (Table I), and the percent similarity or identity of a Delta1 protein with the other Delta1 and Delta2 proteins (Table H).

[0277] A hallmark of Notch ligands such as Jagged-1, is the ability to block the differentiation of the C2C12 cell line from myoblasts into myotubes when co-cultured with NIH3T3 cells under low mitogenic conditions. When C2C12 cells were co-cultured with NIH3T3 cells, which were engineered to express hDelta3, differentiation of C2C12 cells from myoblasts to myotubes was blocked in a similar fashion as has been described for other Notch ligands such as Jagged-1. Therefore, the hDelta3 gene is likely to encode a polypeptide which functions as a bona fide Notch ligand. Indeed, the data presented in Section 5.6, below, indicates that hDelta3 is a bona fide Notch ligand.

[0278] Table I indicates the percent similarity and identity between human Delta3, the Delta1 disclosed in PCT Publication No. WO 97/01571 (Jan. 16, 1997) and non-human Delta1 proteins. Since the amino acid sequence of the human Delta1 protein that is disclosed in PCT Publication No. WO 97/01571 (Jan. 16, 1997) is incomplete, the percentage similarity and identity was determined using a portion of the human Delta1 amino acid sequence which seems most reliable. The portion of the amino acid sequence used corresponds to amino acids 214-370 of the human Delta1 amino acid sequence shown in FIG. 11 of the PCT Publication No. WO 97/01571 (Jan. 16, 1997).

TABLE I
Percentage similarity between the amino acid sequence of human
Delta3 (SEQ ID NO: 2) and that of the various Delta proteins

| | Accession | | % | % |
|---|---|---|---|---|
| GenBank | NO: | SEQ ID NO: | identity | similarity |
| Human Delta1 | N.A. | (SEQ ID NO: 6) | 50 | 66 |
| Mouse Delta1 | X80903 | (SEQ ID NO: 4) | 53 | 70 |
| rat Delta1 | U78889 | (SEQ ID NO: 5) | 54 | 70 |
| chicken Delta1 | U26590 | (SEQ ID NO: 8) | 52 | 68 |
| Xenopus Delta1 | L42229 | (SEQ ID NO: 7) | 51 | 68 |
| zebrafish Delta1 | Y11760 | (SEQ ID NO: 9) | 48 | 67 |
| Xenopus Delta2 | U70843 | (SEQ ID NO: 10) | 47 | 65 |
| Drosophila Delta1 | AA142228 | (SEQ ID NO: 11) | 40 | 58 |
| hDelta-like (dlk) | U15979 | | 33 | 55 |

[0279] Table II indicates the percent similarity and identity between human Delta1 disclosed in PCT Publication No. WO 97/01571 (1997) and non-human Delta1 proteins. Since the amino acid sequence of the human Delta1 protein that is disclosed in PCT Publication No. WO 97/01571 (1997) is incomplete, the percentage similarity and identity was determined using a portion of the human Delta1 amino acid sequence which seems most reliable. The portion of the amino acid sequence used corresponds to amino acids 214-370 of the human Delta1 amino acid sequence shown in FIG. 11 of the PCT application.

TABLE II
Percentage similarity between human Delta1and the various
non-human Delta1 or Delta2 proteins

| | | | | % |
|---|---|---|---|---|
| | | | % | similarity |
| GenBank | Accession | SEQ ID NO: | identity | NO: |
| Human Delta1 | N.A. | (SEQ ID NO: 6) | 100 | 100 |
| mouseDelta1 | X80903 | (SEQ ID NO: 4) | 86 | 95 |
| rat Delta1 | U78889 | (SEQ ID NO: 5) | 88 | 94 |
| chicken Delta1 | U26590 | (SEQ ID NO: 8) | 85 | 89 |
| Xenopus Delta1 | L42229 | (SEQ ID NO: 7) | 78 | 84 |
| zebrafish Delta1 | Y11760 | (SEQ ID NO: 9) | 69 | 80 |
| Xenopus Delta2 | U70843 | (SEQ ID NO: 10) | 57 | 70 |
| Drosophila Delta1 | AA142228 | (SEQ ID NO: 11) | 45 | 62 |
| hDelta-like (dlk) | U15979 | | 37 | 55 |

[0280] Accordingly, Table I indicates that hDelta3 is only approximately 66% similar to the human Delta1 protein; approximately 70% similar to the mouse Delta1 protein; approximately 70% similar to the rat Delta1 protein; approximately 68% similar to the chick Delta1 protein; approximately 68% similar to the Xenopus Delta1 protein, approximately 70% similar to the Xenopus Delta2 protein and approximately 58% similar to the Drosophila Delta1 protein. However, as shown in Table II, the human-Delta1 protein is very similar to the mouse, rat, chick, Xenopus, zebrafish, and Drosophila Delta1 and the Xenopus Delta2 proteins. In addition, mouse and rat Delta1 proteins are about 95% similar. Thus, the amino acid sequence of the orthologs of the Delta1 protein share greater similarity and identity with each other than with the human Delta3 protein of the invention, indicating that at least two families of Delta proteins exist.

[0281] The difference between the newly isolated hDelta3 protein and the previously identified Delta1 and Delta2 proteins can also be seen by creating a phylogenic tree using the Growtree Phylogram computer program (GCG Package). The result of this analysis, indicates that h-Delta3 is on a different “branch” in the phylogenic tree from the other Delta proteins, thus confirming that hDelta3 protein is more distant from the other Delta1 and Delta2 proteins than they are distant from each other. According to the analysis, and as predicted by the sequence alignment, only the Drosophila Delta protein is more distantly related to the previously identified mouse, rat, Xenopus, chicken, zebrafish and human Delta proteins than hDelta3. Thus, the newly isolated hDelta3 protein is a member of a different subspecies of the family of Delta proteins.

[0282] Notwithstanding that each animal species is likely to have at least two or three members (e.g., Delta1, Delta 2, and Delta3), the DSL region, the eight EGF repeats and the TM appear to be highly conserved throughout species. However, these domains of the hDelta3 protein differ more from the corresponding domains in the other Delta proteins than the corresponding domains in the other Delta differ from one another.

[0283] A comparison of human and mouse Delta3 shows that they are 86.6% identical and 88.2% similar. The polypeptides were aligned with the BLAST program using Blosum62, gap weight 12 and length weight 4. One gap was introduced at amino acid position twenty one due to an extra codon present in mouse Delta3. The skilled artisan will appreciate that the domains identified in hDelta3 protein of the present invention are also present in corresponding positions in mouse Delta3.

[0284] Furthermore, as set forth in the examples presented below, Delta3 has been localized to human chromosome 15 in a region close to the framework markers D15S1244 and D15S144. Interestingly, the region on chromosome 15 that is flanked by the markers D15S1040 and D15S118 has been shown to be genetically linked with the disease called Agenesis of the Corpus Callosum with Peripheral Neuropathy (ACCPN) (Casaubon et al. (1996) Am J. Hum. Genet. 58:28). No specific gene has so far been linked to this disease. Accordingly, since Delta3 is localized to a chromosomal region genetically linked to ACCPN and Delta3 is a member of the Notch signaling pathway, defects in which have been associated with a number of neurological diseases or conditions, Delta3 is likely to be the gene involved in ACCPN.

[0285] ACCPN, which is also termed Andermann syndrome (MIM 218000), is an autosomal recessive disorder that occurs with a high prevalence in the French Canadian population in the Charlevoix and Saguenay-Lac St Jean region in Quebec. The disease is characterized by a progressive peripheral neuropathy caused by axonal degeneration and a central nervous system (CNS) malformation characterized by the absence of hypoplasia of the corpus callosum. The disorder appears early in life, is progressive and results in death in the third decade of life of the subject.

[0286] Accordingly, certain aspects of the present invention relate to Delta3 proteins, nucleic acid molecules encoding Delta3 proteins, antibodies immunoreactive with Delta3 proteins, and preparations of such compositions. In addition, drug discovery assays are provided for identifying agents that modulate the biological function of Delta proteins, e.g., Delta3 proteins (i.e. agonists or antagonists), such as by binding to Delta3 or by altering the interaction of Delta3 with either downstream or upstream elements in the Delta/Notch signal transduction pathway by altering the interaction between Delta3 and a Delta3 binding protein. Such agents can be useful therapeutically, for example, to alter cell growth and/or differentiation or induction of apoptosis. Moreover, the present invention provides diagnostic and therapeutic assays and reagents for detecting and treating disorders involving an aberrant Delta3 activity, for example, aberrant expression (or loss thereof) of Delta3 gene or which are associated with a specific Delta allele, e.g., a Delta3 allele.

[0287] The term “activity,” for the purposes herein refers to an activity exerted by a polypeptide of the invention on a responsive cell as determined, in vivo or in vitro, according to standard techniques. An activity can refer to an effector or antigenic function that is directly or indirectly performed by a Delta3 polypeptide (whether in its native or denatured conformation), or by any subsequence thereof. Effector functions include, for example, receptor binding or activation, induction of differentiation, mitogenic or growth promoting activity, induction of apoptosis, signal transduction, immune modulation, DNA regulatory functions and the like, whether presently known or inherent. Antigenic functions include possession of an epitope or antigenic site that is capable of binding antibodies raised against a naturally-occurring or denatured Delta3 polypeptide or fragment thereof. Accordingly, an activity of a Delta3 protein can be binding to a receptor, such as Notch. An activity of a Delta3 protein can also be modulation of cell proliferation and/or differentiation, or cell death in a target cell having an appropriate receptor. A target cell can be, e.g., a neural cell, an endothelial cell, or a cancer cell.

[0288] The term “aberrant Delta3 activity” or “abnormal Delta3 activity” is intended to encompass an activity of Delta3 which differs from the same Delta3 expression or activity in a healthy subject. An aberrant Delta3 activity can result, e.g., from a mutation in the protein, which results, e.g., in lower or higher binding affinity to a receptor. An aberrant Delta3 activity can also result from a lower or higher level of Delta3 on cells, which can result, e.g., from aberrant transcription, splicing, or translation of the Delta3 gene. For example, an aberrant Delta3 activity can result from an abnormal promoter activity. An aberrant Delta3 activity can also result from an aberrant signalling through the cytoplasmic domain of the Delta3 protein, such that, e.g., an aberrant signal is transduced. Aberrant signalling can result from a mutation in the cytoplasmic domain of Delta3 or, alternatively, from the contact with an abnormal cytoplasmic protein. An aberrant Delta3 activity can also result from contact of a Delta3 protein with an aberrant receptor, e.g., abnormal Notch protein.

[0289] The term “allele”, which is used interchangeably herein with “allelic variant” refers to alternative forms of a gene, nucleic acid or portions thereof, as well as to a polypeptide encoded by said gene, nucleic acid, or portion thereof. Nucleic acid alleles occupy the same locus or position on homologous chromosomes. When a subject has two identical alleles of a gene, the subject is said to be homozygous for the gene or allele. When a subject has two different alleles of a gene, the subject is said to be heterozygous for the gene. Alleles of a specific gene can differ from each other in a single nucleotide, or several nucleotides, and can include substitutions, deletions, and insertions of nucleotides. An allele of a gene can also be a form of a gene containing a mutation.

[0290] The term “allelic variant of a polymorphic region of a Delta3 gene” refers to a region of a Delta gene having one of several nucleotide sequences found in that region of the gene in other individuals, as well as to polypeptides encoded by nucleic acid molecules comprising said sequences.

[0291] The term “agonist”, as used herein, is meant to refer to an agent that upregulates (e.g., potentiates or supplements) Delta3 expression, levels and/or activity. It is to be understood that a Delta3 agonist can include a compound which increases signaling from a Delta3 protein, e.g., a compound bound to Delta3, such as a stimulatory form of a toporythmic protein or a small molecule. A Delta3 agonist can also, for example, be a compound which modulates the expression or activity of a protein which is located upstream or downstream of Delta3 and or which interacts with Delta3.

[0292] “Antagonist” as used herein is meant to refer to an agent that downregulates (e.g., suppresses or inhibits) Delta3 expression, levels and/or activity. A Delta3 antagonist can, for example, be a compound which decreases signalling from a Delta3 protein, e.g., a compound binding to Delta3 such as an inhibitory form of a toporythmic protein, or a small molecule. A Delta3 antagonist can include compounds that inhibit the interaction between a Delta3 protein and another molecule, e.g., a toporythmic protein. A Delta3 antagonist can also be a compound which modulates the expression or activity of a protein which is located upstream or downstream of Delta3 and/or which interacts with Delta3.

[0293] The term “antibody” as used herein refers to immunoglobulin molecules and immunologically active portions of immunoglobulin molecules, i.e., molecules that contain an antigen biding site which specifically binds an antigen, such as a polypeptide of the invention, e.g., an epitope of a polypeptide of the invention. A molecule

[0294] The term “antibody” as used herein refers to immunoglobulin molecules and immunologically active portions of immunoglobulin molecules, i.e., molecules that contain an antigen binding site which specifically binds an antigen, such as a polypeptide of the invention, e.g., an epitope of a polypeptide of the invention. A molecule which specifically binds to a given polypeptide of the invention is a molecule which binds the polypeptide, but does not substantially bind other molecules in a sample, e.g., a biological sample, which naturally contains the polypeptide. Examples of immunologically active portions of immunoglobulin molecules include F(ab) and F(ab′)₂ fragments which can be generated by treating the antibody with an enzyme such as pepsin. The invention provides polyclonal and monoclonal antibodies. The term “monoclonal antibody” or “monoclonal antibody composition”, as used herein, refers to a population of antibody molecules that contain only one species of an antigen binding site capable of immunoreacting with a particular epitope.

[0295] “Cells,” “host cells” or “recombinant host cells” are terms used interchangeably herein. It is understood that such terms refer not only to the particular subject cell but to the progeny or potential progeny of such a cell. Because certain modifications may occur in succeeding generations due to either mutation or environmental influences, such progeny may not, in fact, be identical to the parent cell, but are still included within the scope of the term as used herein.

[0296] “Complementary” sequences as used herein refer to sequences which have sufficient complementarity to be able to hybridize, forming a stable duplex.

[0297] A “delivery complex” shall mean a targeting means (e.g., a molecule that results in higher affinity binding of a gene, protein, polypeptide or peptide to a target cell surface and/or increased cellular uptake by a target cell). Examples of targeting means include: sterols (e.g., cholesterol), lipids (e.g., a cationic lipid, virosome or liposome), viruses (e.g., adenovirus, adeno-associated virus, and retrovirus) or target cell specific binding agents (e.g., ligands recognized by target cell specific receptors). Preferred complexes are sufficiently stable in vivo to prevent significant uncoupling prior to internalization by the target cell. However, the complex is cleavable under appropriate conditions within the cell so that the gene, protein, polypeptide or peptide is released in a functional form.

[0298] As is well known, genes for a particular polypeptide may exist in single or multiple copies within the genome of an individual. Such duplicate genes may be identical or may have certain modifications, including nucleotide substitutions, additions or deletions, which all still code for polypeptides having substantially the same activity. The term “DNA sequence encoding a Delta3 polypeptide” may thus refer to one or more genes within a particular individual. Moreover, certain differences in nucleotide sequences may exist between individual organisms, which are called alleles. Such allelic differences may or may not result in differences in amino acid sequence of the encoded polypeptide yet still encode a protein with the same biological activity.

[0299] The term “Delta3 therapeutic” refers to various compositions of Delta3 modulators (e.g., agonists or antagonists), such as polypeptides, antibodies, peptidomimetics, small molecules and nucleic acids which are capable of mimicking or potentiating (agonizing) or inhibiting suppressing (antagonizing) Delta3 expression, levels, or activity, e.g., which are capable of agonizing or antagonizing the effects of a naturally-occurring Delta3 protein.

[0300] The terms “Delta3 polypeptide” and “Delta3 protein” are intended to encompass, e.g., Delta3 polypeptides which have at least one activity of a native Delta3 polypeptide, or can, e.g., antagonize or agonize at least one biological activity of a native Delta3 polypeptide.

[0301] A “fusion protein” is a fusion of a first amino acid sequence encoding one of the subject Delta3 polypeptides with a second, heterologous amino acid sequence. In general, a fusion protein can be represented by the general formula X-Delta3-Y, wherein Delta3 represents a portion of the protein which is derived from one of the Delta3 proteins of the invention, and X and Y are independently absent or represent amino acid sequences which are heterologous to (that is, not related to) one of the Delta3 sequences in an organism, including naturally-occurring mutants. Among the Delta3 fusion protein is a Delta3-Ig fusion protein.

[0302] As used herein, the term “gene” or “recombinant gene”, as applied to Delta3, refers to a nucleic acid molecule comprising an open reading frame encoding one of the Delta3 polypeptides of the present invention. In one embodiment, these terms relate to a cDNa sequence including, but not limited to a nucelci acid sequence obtained via reverse transcription of an mRNA molecule.

[0303] The term “growth state” of a cell refers to the proliferative state of a cell as well as to its differentiative state. Accordingly, the term refers to the phase of the cell cycle in which the cell is, e.g., G0, G1, G2, prophase, metaphase, or telophase, as well as to its state of differentiation, e.g., undiffereniated, partially differentiated, or fully differentiated. Without wanting to be limited, differentiation of a cell is usually accompanied by a decrease in the proliferative rate of a cell.

[0304] “Homology” or “identity” or “similarity” refers to sequence similarity between two peptides or between two nucleic acid molecules. Homology can be determined by comparing a position in each sequence which may be aligned for purposes of comparison. When a position in the compared sequence is occupied by the same base or amino acid, then the molecules are identical at that position. A degree of homology or similarity or identity between nucleic acid sequences is a function of the number of identical or matching nucleotides at positions shared by the nucleic acid sequences. A degree of identity of amino acid sequences is a function of the number of identical amino acids at positions shared by the amino acid sequences. Likewise, a degree of identity of nucleic acid sequences is a function of the number of identical nucleic acids at positions shared by the nucleic acid sequences.

[0305] Furthermore, a degree of homology or similarity of amino acid sequences is a function of the number of conserved amino acids at positions shared by the amino acid sequences. A sequence which is “unrelated” or “non-homologous” with one of the hDelta3 sequences of the present invention typically is a sequence which shares less than 40% identity, though preferably less than 25% identity with one of the hDelta3 sequences of the present invention.

[0306] To determine the percent identity of two amino acid sequences or of two nucleic acids, the sequences are aligned for optimal comparison purposes (e.g., gaps can be introduced in the sequence of a first amino acid or nucleic acid sequence for optimal alignment with a second amino or nucleic acid sequence). The amino acid residues or nucleotides at corresponding amino acid positions or nucleotide positions are then compared. When a position in the first sequence is occupied by the same amino acid residue or nucleotide as the corresponding position in the second sequence, then the molecules are identical at that position. The percent identity between the two sequences is a function of the number of identical positions shared by the sequences (i.e., % identity=# of identical positions/total # of positions (e.g., overlapping positions)×100). In one embodiment the two sequences are the same length. In another embodiment, the mouse Delta3 polypeptide is one amino acid longer than human Delta3.

[0307] Preferably, the determination of percent identity between two sequences is accomplished using a mathematical algorithm. A preferred, non-limiting example of a mathematical algorithm utilized for the comparison of two sequences is the algorithm of Karlin and Altschul (1990) Proc. Natl. Acad. Sci. USA 87:2264-2268, modified as in Karlin and Altschul (1993) Proc. Natl. Acad. Sci. USA 90:5873-5877. Such an algorithm is incorporated into the NBLAST and XBLAST programs of Altschul, et al. (1990) J. Mol. Biol. 215:403-410. BLAST nucleotide searches can be performed with the NBLAST program, score=100, wordlength=12 to obtain nucleotide sequences homologous to a nucleic acid molecules of the invention. BLAST protein searches can be performed with the XBLAST program, score=50, wordlength=3 to obtain amino acid sequences homologous to a protein molecules of the invention. To obtain gapped alignments for comparison purposes, Gapped BLAST can be utilized as described in Altschul et al. (1997) Nucleic Acids Res. 25:3389-3402. Alternatively, PSI-Blast can be used to perform an iterated search which detects distant relationships between molecules. Id. When utilizing BLAST, Gapped BLAST, and PSI-Blast programs, the default parameters of the respective programs (e.g., XBLAST and NBLAST) can be used. Another preferred, non-limiting example of a mathematical algorithm utilized for the comparison of sequences is the algorithm of Myers and Miller, (1988) CABIOS 4:11-17. Such an algorithm is incorporated into the ALIGN program (version 2.0) which is part of the GCG sequence alignment software package. When utilizing the ALIGN program for comparing amino acid sequences, a PAM120 weight residue table, a gap length penalty of 12, and a gap penalty of 4 can be used.

[0308] As used herein, the term “hybridizes under stringent conditions” is intended to describe conditions for hybridization and washing under which nucleotide sequences at least 60% (65%, 70%, preferably 75% or more) identical to each other typically remain hybridized to each other. Such stringent conditions are known to those skilled in the art and can be found in Current Protocols in Molecular Biology, John Wiley & Sons, N.Y. (1989), 6.3.1-6.3.6, which describes aqueous and non-aqueous methods, either of which can be used. Another preferred, non-limiting example of stringent hybridization conditions are hybridization in 6× sodium chloride/sodium citrate (SSC) at about 45° C., followed by one or more washes in 2.0×SSC at 50° C. (low stringency) or 0.2×SSC, 0.1% SDS at 50-65° C. (high stringency). Another preferred example of stringent hybridization conditions are hybridization in 6× sodium chloride/sodiumcitrate (SSC) at about 45° C., followed by one or more washes in 0.2×SSC, 0.1% SDS at 50° C. Another example of stringent hybridization conditions are hybridization in 6× sodium chloride/sodium citrate (SSC) at about 45° C., followed by one or more washes in 0.2×SSC, 0.1% SDS at 55° C. A further example of stringent hybridization conditions are hybridization in 6× sodium chloride/sodium citrate (SSC) at about 45° C., followed by one or more washes in 0.2×SSC, 0.1% SDS at 60° C. Preferably, stringent hybridization conditions are hybridization in 6× sodium chloride/sodium citrate (SSC) at about 45° C., followed by one or more washes in 0.2×SSC, 0.1% SDS at 65° C. Particularly preferred stringency conditions (and the conditions that should be used if the practitioner is uncertain about what conditions should be applied to determine if a molecule is within a hybridization limitation of the invention) are 0.5M Sodium Phosphate, 7% SDS at 65° C., followed by one or more washes at 0.2×SSC, 1% SDS at 65° C. In one embodiment, an isolated nucleic acid molecule of the invention that hybridizes under stringent conditions to the sequence of SEQ ID NOs: 1, 3, 24, 26, 27, 29, 31, 33, 35, 37, 39, 41, 43 or 45, or complement thereof, corresponds to a naturally-occurring nucleic acid molecule.

[0309] The term “interact” as used herein is meant to include detectable interactions between molecules, such as can be detected using, for example, a yeast two hybrid assay. The term interact is also meant to include “binding” interactions between molecules. Interactions may be, e.g., protein-protein, protein-nucleic acid, protein-small molecule, or nucleic acid-small molecule in nature.

[0310] The term “modulation” as used herein refers to both upregulation, i.e., stimulation, and downregulation, e.g., suppression, of a response.

[0311] The term “mutated gene” refers to an allelic form of a gene, which is capable of altering the phenotype of a subject having the mutated gene relative to a subject which does not have the mutated gene. If a subject must be homozygous for this mutation to have an altered phenotype, the mutation is said to be recessive. If one copy of the mutated gene is sufficient to alter the genotype of the subject, the mutation is said to be dominant. If a subject has one copy of the mutated gene and has a phenotype that is intermediate between that of a homozygous and that of a heterozygous (for that gene) subject, the mutation is said to be co-dominant. As used herein, a “naturally-occurring” nucleic acid molecule refers to an RNA or DNA molecule having a nucleotide sequence that occurs in nature (e.g., encodes a natural protein).

[0312] The “non-human animals” of the invention include mammalians such as rodents, non-human primates, sheep, dog, cow, chickens, amphibians, reptiles, etc. Preferred non-human animals are selected from the rodent family including rat and mouse, most preferably mouse, though transgenic amphibians, such as members of the Xenopus genus, and transgenic chickens can also provide important tools for understanding and identifying agents which can affect, for example, embryogenesis and tissue formation. The term “chimeric animal” is used herein to refer to animals in which the recombinant gene is found, or in which the recombinant is expressed in some but not all cells of the animal. The term “tissue-specific chimeric animal” indicates that one of the recombinant Delta3 genes is present and/or expressed or disrupted in some tissues but not others.

[0313] As used herein, the term “nucleic acid molecule” is intended to include DNA molecules and RNA molecules (e.g., mRNA) and analogs of the DNA or RNA generated using nucleotide analogs. The nucleic acid molecule can be single-stranded or double-stranded, but preferably is double-stranded DNA. An “isolated” nucleic acid molecule is one which is separated from other nucleic acid molecules which are present in the natural source of the nucleic acid molecule. Preferably, an “isolated” nucleic acid molecule is free of sequences (preferably protein encoding sequences) which naturally flank the nucleic acid (i.e., sequences located at the 5′ and 3′ ends of the nucleic acid) in the genomic DNA of the organism from which the nucleic acid is derived. In other embodiments, the “isolated” nucleic acid is free of intron sequences. For example, in various embodiments, the isolated nucleic acid molecule preferably includes no more than 10 kilobases (kb), and more preferably, contains less than about 5 kB, 4 kB, 3 kB, 2 kB, 1 kB, 0.5 kB or 0.1 kB of nucleotide sequences which naturally flank the nucleic acid molecule in genomic DNA of the cell from which the nucleic acid is derived. Moreover, an “isolated” nucleic acid molecule, such as a cDNA molecule, can be substantially free of other cellular material, viral material, or culture medium when produced by recombinant techniques, or substantially free of chemical precursors or other chemicals when chemically synthesized.

[0314] The terms “protein”, “polypeptide” and “peptide” are used interchangably herein. The term “substantially free of other cellular proteins” (also referred to herein as “contaminating proteins”) or “substantially pure or purified preparations” are defined as encompassing preparations of Delta3 polypeptides having less than about 20% (by dry weight) contaminating protein, and preferably having less than about 5% contaminating protein. Functional forms of the subject polypeptides can be prepared, for the first time, as purified or isolated preparations by using a cloned gene as described herein. By “purified” or “isolated,” it is meant, when referring to a protein of the invention, that the indicated molecule is present in the substantial absence of other biological macromolecules, such as other proteins. The term “purified” or “isolated” as used herein preferably means at least 80% by dry weight, more preferably in the range of 95-99% by weight, and most preferably at least 99.8% by weight, of biological macromolecules of the same type present (but water, buffers, and other small molecules, especially molecules having a molecular weight of less than about 5000, can be present). The term “pure” or “isolated” as used herein preferably has the same numerical limits as “purified” or “isolated” immediately above. “Isolated” and “purified” do not encompass either natural materials in their native state or natural materials that have been separated into components (e.g., in an acrylamide gel) but not obtained either as pure (e.g., lacking contaminating proteins, or chromatography reagents such as denaturing agents and polymers, e.g., acrylamide or agarose) substances or solutions. In preferred embodiments, purified or isolated Delta3 preparations will lack any contaminating proteins from the same animal from which Delta3 is normally produced, as can be accomplished by recombinant expression of, for example, a human Delta3 protein in a non-human cell.

[0315] As used herein, the term “tissue-specific promoter” means a DNA sequence that serves as a promoter, i.e., regulates expression of a selected DNA sequence operably linked to the promoter, and which effects expression of the selected DNA sequence in specific cells of a tissue, such as cells of cardiac, hepatic or pancreatic origin, neuronal cells, or immune cells. The term also covers so-called “leaky” promoters, which regulate expression of a selected DNA primarily in one tissue, but cause expression in other tissues as well.

[0316] “Transcriptional regulatory sequence” is a generic term used throughout the specification to refer to DNA sequences, such as initiation signals, enhancers, and promoters, which induce or control transcription of protein coding sequences with which they are operably linked. In certain embodiments, transcription of one of the recombinant Delta3 genes is under the control of a promoter sequence (or other transcriptional regulatory sequence) which controls the expression of the recombinant gene in a cell-type in which expression is intended. It will also be understood that the recombinant gene can be under the control of transcriptional regulatory sequences which are the same or which are different from those sequences which control transcription of the naturally-occurring forms of Delta3 proteins.

[0317] As used herein, the term “transfection” means the introduction of a nucleic acid, e.g., an expression vector, into a recipient cell by nucleic acid-mediated gene transfer. “Transformation”, as used herein, refers to a process in which a cell's genotype is changed as a result of the cellular uptake of exogenous DNA or RNA, and, for example, the transformed cell expresses a recombinant form of a Delta3 polypeptide or, in the case of anti-sense expression from the transferred gene, the expression of a naturally-occurring form of the Delta3 protein is disrupted.

[0318] As used herein, the term “transgene” means a nucleic acid sequence (encoding, e.g., one of the Delta3 polypeptides, or an antisense transcript thereto), which is partly or entirely heterologous, i.e., foreign, to the transgenic animal or cell into which it is introduced, or, is homologous to an endogenous gene of the transgenic animal or cell into which it is introduced, but which is designed to be inserted, or is inserted, into the animal's genome in such a way as to alter the genome of the cell into which it is inserted (e.g., it is inserted at a location which differs from that of the natural gene or its insertion results in a knockout). A transgene can include one or more transcriptional regulatory sequences and any other nucleic acid, such as introns, that may be necessary for optimal expression of a selected nucleic acid.

[0319] A “transgenic animal” refers to any non-human animal, preferably a non-human mammal, bird or an amphibian, in which one or more of the cells of the animal contain heterologous nucleic acid (“transgene”) introduced by way of human intervention, such as by transgenic techniques well known in the art. The nucleic acid is introduced into the cell, directly or indirectly by introduction into a precursor of the cell, by way of deliberate genetic manipulation, such as by microinjection or by infection with a recombinant virus. The term genetic manipulation does not include classical cross-breeding, or in vitro fertilization, but rather is directed to the introduction of a recombinant DNA molecule. This molecule may be integrated within a chromosome, or it may be extrachromosomally replicating DNA. In the typical transgenic animals described herein, the transgene causes cells to express a recombinant form of one of the Delta3 proteins, e.g., either agonistic or antagonistic forms. However, transgenic animals in which the recombinant Delta3 gene is silent are also contemplated, as for example, the FLP or CRE recombinase dependent constructs described below. Moreover, “transgenic animal” also includes those recombinant animals in which gene disruption of one or more Delta3 genes is caused by human intervention, including both recombination and antisense techniques. A “homologous recombinant animal” is a non-human animal, preferably a mammal, more preferably a mouse, in which an endogenous gene has been altered by homologous recombination between the endogenous gene and an exogenous DNA molecule introduced into a cell of the animal, e.g., an embryonic cell of the animal, prior to development of the animal.

[0320] As used herein, the term “vector” refers to a nucleic acid molecule capable of transporting another nucleic acid to which it has been linked. One type of preferred vector is an episome, i.e., a nucleic acid capable of extra-chromosomal replication. Preferred vectors are those capable of autonomous replication and/expression of nucleic acids to which they are linked. Vectors capable of directing the expression of genes to which they are operatively linked are referred to herein as “expression vectors”. In general, expression vectors of utility in recombinant DNA techniques are often in the form of “plasmids” which refer generally to circular double stranded DNA loops which, in their vector form are not bound to the chromosome. However, the invention is intended to include such other forms of expression vectors which serve equivalent functions and which become known in the art subsequently hereto.

[0321] The term “treating” as used herein is intended to encompass curing as well as ameliorating at least one symptom of the condition or disease.

[0322] The percent identity between two sequences can be determined using techniques similar to those described above, with or without allowing gaps. In calculating percent identity, typically only exact matches are counted.

### FTHMA-070 and T85

[0323] The present invention is based, in part, on the discovery of a cDNA molecule encoding human FTHMA-070, a member of the TNF receptor superfamily.

[0324] A nucleotide sequence encoding a human FTHMA-070 protein is shown in SEQ ID NO:53 and SEQ ID NO:55 (open reading frame only). A predicted amino acid sequence of FTHMA-070 protein is also shown in SEQ ID NO:54.

[0325] The FTHMA-070 cDNA of SEQ ID NO:53, which is approximately 2133 nucleotides long including untranslated regions, encodes a 401 amino acid protein.

[0326] Human FTHMA-070 is one member of a family of molecules (the “FTHMA-070 family”) having certain conserved structural and functional features. The term “family” when referring to the protein and nucleic acid molecules of the invention is intended to mean two or more proteins or nucleic acid molecules having a common structural domain and having sufficient amino acid or nucleotide sequence identity as defined herein. Such family members can be naturally occurring and can be from either the same or different species. For example, a family can contain a first protein of human origin and a homologue of that protein of murine origin, as well as a second, distinct protein of human origin and a murine homologue of that protein. Members of a family may also have common functional characteristics.

[0327] As used interchangeably herein a “FTHMA-070 activity”, “biological activity of FTHMA-070” or “functional activity of FTHMA-070”, refers to an activity exerted by a FTHMA-070 protein, polypeptide or nucleic acid molecule on a FTHMA-070 responsive cell as determined in vivo, or in vitro, according to standard techniques. A FTHMA-070 activity can be a direct activity, such as an association with or an enzymatic activity on a second protein or an indirect activity.

[0328] Accordingly, another embodiment of the invention features isolated FTHMA-070 proteins and polypeptides having a FTHMA-070 activity.

[0329] Yet another embodiment of the invention features FTHMA-070 molecules which contain a signal sequence. Generally, a signal sequence (or signal peptide) is a peptide containing about 20 amino acids which occurs at the extreme N-terminal end of secretory and integral membrane proteins and which contains large numbers of hydrophobic amino acid residues and serves to direct a protein containing such a sequence to a lipid bilayer.

[0330] The present invention is also based, in part, on the discovery of a cDNA molecule encoding human T85, a protein which appears to be a secreted (non-membrane bound) form of human Robo protein, a protein which is a nerve axon guidance receptor.

[0331] A nucleotide sequence encoding a human T85 protein is shown in SEQ ID NO:57 and SEQ ID NO:59 (open reading frame only). A predicted amino acid sequence of FTMA-070 protein is also shown in SEQ ID NO:58.

[0332] The FTMA-070 cDNA of SEQ ID NO:57, which is approximately 4291 nucleotides long including untranslated regions, encodes a 753 amino acid protein. Human T85 is one member of a family of molecules (the “T85 family”) having certain conserved structural and functional features. The term “family” when referring to the protein and nucleic acid molecules of the invention is intended to mean two or more proteins or nucleic acid molecules having a common structural domain and having sufficient amino acid or nucleotide sequence identity as defined herein. Such family members can be naturally occurring and can be from either the same or different species. For example, a family can contain a first protein of human origin and a homologue of that protein of murine origin, as well as a second, distinct protein of human origin and a murine homologue of that protein. Members of a family may also have common functional characteristics.

[0333] In one embodiment, a T85 protein includes a fibronectin type III domain having at least about 65%, preferably at least about 75%, and more preferably about 85%, 95%, or 98% amino acid sequence identity to a fibronectin type III domain of SEQ ID NO:61, or 62.

[0334] In one embodiment, a T85 protein includes an Ig superfamily domain having at least about 65%, preferably at least about 75%, and more preferably about 85%, 95%, or 98% amino acid sequence identity to an Ig superfamily domain of SEQ ID NO:63, 64, 65, 66, or 67.

[0335] Preferred T85 polypeptides of the present invention have an amino acid sequence sufficiently identical to a sequence identity to a fibronectin type III domain of SEQ ID NO:61 or 62 or an Ig superfamily domain of SEQ ID NO:63, 64, 65, 66, or 67. As used herein, the term “sufficiently identical” refers to a first amino acid or nucleotide sequence which contains a sufficient or minimum number of identical or equivalent (e.g., an amino acid residue which has a similar side chain) amino acid residues or nucleotides to a second amino acid or nucleotide sequence such that the first and second amino acid or nucleotide sequences have a common structural domain and/or common functional activity. For example, amino acid or nucleotide sequences which contain a common structural domain having about 65% identity, preferably 75% identity, more preferably 85%, 95%, or 98% identity are defined herein as sufficiently identical.

[0336] As used interchangeably herein a “T85 activity”, “biological activity of T85” or “functional activity of T85”, refers to an activity exerted by a T85 protein, polypeptide or nucleic acid molecule on a T85 responsive cell as determined in vivo, or in vitro, according to standard techniques. A T85 activity can be a direct activity, such as an association with or an enzymatic activity on a second protein.

[0337] Accordingly, another embodiment of the invention features isolated T85 proteins and polypeptides having a T85 activity.

[0338] Yet another embodiment of the invention features T85 molecules which contain a signal sequence. Generally, a signal sequence (or signal peptide) is a peptide containing about 20 amino acids which occurs at the extreme N-terminal end of secretory and integral membrane proteins and which contains large numbers of hydrophobic amino acid residues and serves to direct a protein containing such a sequence to a lipid bilayer.

### TANGO 77

[0339] The polypeptide cytokine interleukin-1 (IL-1) is a critical mediator of inflammatory and overall immune response. To date, three members of the IL-1 family, IL-1α, IL-1β and IL-1ra (Interleukin-1 receptor antagonist) have been isolated and cloned. IL-1α and IL-1β are proinflammatory cytokines which elicit biological responses, whereas IL-1ra is an antagonist of IL-1α and IL-1β activity. Two distinct cell-surface receptors have been identified for these ligands, the type 1 IL-1 receptor (IL-1RtI) and type II IL-1 receptor (IL-1RtII). Recent results suggest that the IL-1RtI is the receptor responsible for transducing a signal and producing biological effects.

[0340] While inflammation is an important homeostatic mechanism, aberrant inflammation has the potential for inducing damage to the host. Elevated IL-1 levels are known to be associated with a number of diseases particularly autoimmune diseases and inflammatory disorders. Since Il-1ra is a naturally occurring inhibitor of IL-1, IL-1ra can be used to limit the aberrant and potentially deleterious effects of IL-1. In experimental animals, pretreatment with IL-1ra has been shown to prevent death resulting from lipopolysaccharide-induced sepsis. The relative absence of IL-1ra has also been suggested to play a role in human inflammatory bowel disease.

[0341] The present invention is based on the discovery of a cDNA molecule encoding human Tango-77, a member of the cytokine superfamily. The cDNA molecule encoding human Tango-77 has three possible open reading frames. The three possible nucleotide open reading frames for human Tango-77 protein are shown in SEQ ID NO:73, SEQ ID NO:76 and SEQ ID NO:80. The predicted amino acid sequence for the three possible Tango-77 immature proteins are shown in SEQ ID NO:72, SEQ ID NO:77 or SEQ ID NO:81 and three possible mature proteins are shown in SEQ ID NO:75, SEQ ID NO:79 and SEQ ID NO:83.

[0342] The Tango-77 cDNA of SEQ ID NO:71, which is approximately 989 nucleotides long including untranslated regions, encodes a protein amino acid having a molecular weight of approximately 19 kDa, 18 kDa, or 14.9 KDa (excluding post-translational modifications) and the possible mature form of the protein has a molecular weight of 13 kDa. A plasmid containing a cDNA encoding human Tango-77 (with the cDNA insert name of Of fthx077) was deposited with American Type Culture Collection (ATCC), 10801 University Boulevard, Manassas, Va. 20110-2209 on Jul. 2, 1998 and assigned Accession Number 98807. This deposit will be maintained under the terms of the Budapest Treaty on the International Recognition of the Deposit of Microorganisms for the Purposes of Patent Procedure. This deposit was made merely as a convenience for those of skill in the art and is not an admission that a deposit is required under 35 U.S.C. §112.

[0343] Human Tango-77 is one member of a family of molecules (the “Tango-77 family”) having certain conserved structural and functional features. The term “family,” when referring to the protein and nucleic acid molecules of the invention, is intended to mean two or more proteins or nucleic acid molecules having a common structural domain and having sufficient amino acid or nucleotide sequence identity as defined herein. Such family members can be naturally occurring and can be from either the same or different species. For example, a family can contain a first protein of human origin and a homologue of that protein of murine origin, as well as a second, distinct protein of human origin and a murine homologue of that protein. Members of a family may also have common functional characteristics.

[0344] As used interchangeably herein a “Tango-77 activity”, “biological activity of Tango-77” or “functional activity of Tango-77”, refers to an activity exerted by a Tango-77 protein, polypeptide or nucleic acid molecule on a Tango-77 responsive cell as determined in vivo, or in vitro, according to standard techniques. A Tango-77 activity can be a direct activity, such as an association with a second protein, or an indirect activity, such as a cellular signaling activity mediated by interaction of the Tango-77 protein with a second protein. In a preferred embodiment, a Tango-77 activity includes at least one or more of the following activities: (i) the ability to interact with proteins in the Tango-77 signalling pathway (ii) the ability to interact with a Tango-77 ligand or receptor; or (iii) the ability to interact with an intracellular target protein, (iv) the ability to interact with a protein involved in inflammation, and (v) the ability to bind the IL-1 receptor.

[0345] Accordingly, another embodiment of the invention features isolated Tango-77 proteins and polypeptides having a Tango-77 activity.

[0346] Yet another embodiment of the invention features Tango-77 molecules which contain a signal sequence. Generally, a signal sequence (or signal peptide) is a peptide containing about 21 to 63 amino acids which occurs at the extreme N-terminal end of a secretory protein. The native Tango-77 signal sequence (SEQ ID NO:74, SEQ ID NO:78, or SEQ ID NO:82) can be removed and replaced with a signal sequence from another protein. In certain host cells (e.g., mammalian host cells), expression and/or secretion of Tango-77 can be increased through use of a heterologous signal sequence. For example, the gp67 secretory sequence of the baculovirus envelope protein can be used as a heterologous signal sequence. Alternatively, the native Tango-77 signal sequence can itself be used as a heterologous signal sequence in expression systems, e.g., to facilitate the secretion of a protein of interest.

### SPOIL

[0347] Interleukin-1 (ILA) is a multifunctional cytokine which comprises a family of two polypeptides, IL-1α and IL-1β, with a wide spectrum of activities. IL-1α and IL-1β have been found to possess inflammatory, metabolic, physiologic, hematopoeitic and immunologic properties. Although both forms of IL-1 are distinct gene products, they recognize the same cell surface receptors (i.e. IL-1 receptors, IL-1RtI and IL-1RtI).

[0348] Besides skin keratinocytes, some epithelial cells and certain cells in the central nervous system, significant amounts of mRNA encoding IL-1 are not observed in most other healthy cells. However, IL-1 production is dramatically increased by a variety of cells in response to infection, microbial toxins, inflammatory agents, products of activated lymphocytes, complement and clotting components. In addition, IL-1 has been recognized as a prototype of proinflammatory cytokines in that it induces the expression of a variety of genes and the synthesis of several proteins that in turn, induce acute and chronic inflammation. Thus, circulating IL-1 has been implicated in various disease states including sepsis, rheumatoid arthritis, stroke and diabetes. Dinarello (1991) Blood 77(8):1627-1652.

[0349] In addition, IL-1 has been shown to regulate bone reabsorption and bone formation with its major activity in bone metabolism being osteoclast activation. See Gowen et al. (1983) Nature 306:378-380. In fact, IL-1 has been reported to be a potent stimulator of bone reabsorption and has also been reported to increase prostaglandin synthesis in bone. Lorenzo et al. (1987) Endocrinology 121:1164-1170.

[0350] A naturally-occurring, secreted inhibitor of IL-1 which specifically inhibits IL-1 activity has also been identified. Carter et al. (1990) Nature 344:633. This protein, called IL-1 receptor antagonist protein (IL-1ra), has been shown to compete with the binding of IL-1 to its surface receptors. Thus, significant interest has arisen in administering IL-1ra to block the activity of IL-1 in various diseases including septic shock (Ohlsson et al. (1990) Nature 348:550-556), immune complex-induced colitis (Cominelli (1990) J. Clin. Invest. 86:972-979), acute myelogenous leukemia (Rambaldi et al. (1990) Blood 76:114-120) and osteoporosis (Pacifici et al. (1993) J. Clin. Endocrinol. Metab. 77:1135-1141). Further research has indicated that the secreted form of IL-1ra is, in fact, a member of a family of IL-1ra proteins, at least three of which are intracellular proteins (Haskill et al. (1991) Proc. Natl. Acad. Sci. USA 88:3681-3685; Muzio et al. (1995) J. Exp. Med. 182:623-628; and Weissbach et al. (1998) Biochem. Biophys. Res. Comm. 244:91-95. The family members are alternatively spliced isoforms of the IL-ra gene which consists of at least seven exons. A truncated form of the fourth exon is produced as a result of an internal splice acceptor site, resulting in the secreted isoform.

[0351] The present invention is based on the discovery of novel molecules having homology to members of the IL-1 receptor antagonist (IL-1ra) family, referred to herein as SPOIL protein and nucleic acid molecules. The SPOIL proteins and nucleic acid molecules comprise a family of molecules having certain conserved structural and functional features. The term “family” when referring to the protein and nucleic acid molecules of the invention is intended to mean two or more protein or nucleic acid molecules having a common structural domain and having sufficient amino acid or nucleotide sequence identity as defined herein. Such family members can be naturally occurring and can be from either the same or different species. For example, a family can contain a first protein of human origin, as well as other, distinct proteins of human origin or alternatively, can contain homologues of non-human origin (e.g., mouse). Members of a family may also have common functional characteristics.

[0352] For example, an isolated protein of the invention, preferably a SPOIL protein, is identified based on the presence of at least one “IL-1 signature domain” in the protein or corresponding nucleic acid molecule. As used herein, the term “IL-1 signature domain” refers to a protein domain which contains a conserved motif of a SPOIL protein member (or IL-1ra or IL-1 family member) and is at least about 10-30 amino acid residues, preferably about 15-25 amino acid residues, more preferably about 17-24 amino acid residues, more preferably 19-23 amino acid residues, and more preferably 21-22 amino acid residues in length. An IL-1 signature domain includes the following amino acid motif: Xaa₁-Xaa₂-S-Xaa₃-Xaa₄-Xaa₅-P-Xaa₆-Xaa₇-Xaag-Xaa₉-Xaa₁₀-Xaaₙ-Xaa₁₁, wherein Xaa₁, Xaa₂, Xaa₄, Xaa₅, Xaa₆, Xaa₇, and Xaaₙ represents any amino acid residue; Xaa₃ is alanine (A), serine (S), leucine (L) or valine (V); Xaag is phenylalanine (F), tyrosine (Y), leucine (L), isoleucine (I) or valine (V); Xaa₉ is either leucine (L) or isoleucine (I); Xaa₁₀ is serine (S), cysteine (C) or alanine (A); Xaa₁₁ is leucine (L), isoleucine (I), valine (V) or methionine (M); and n is about 5-25 amino acid residues, more preferably about 6-18 amino acid residues, and more preferably about 6-15 amino acid residues (SEQ ID NO:107). In one embodiment, an IL-1 signature domain includes the following amino acid motif: L-Xaa₁-S-V-Xaa₂-Xaa₃-P-Xaa₄-Xaa₅-Xaaₙ-I, wherein Xaa represents any amino acid, and n is about 5-25 amino acidresidues, more preferably about 6-18 amino acid residues, and more preferably about 6-15 amino acid residues (SEQ ID NO:108). Preferably, the IL-1 signature domain includes the following amino acid sequence: L-Xaa₁-S-V-Xaa₂-Xaa₃-P-Xaa₄-Xaa₅-Xaaₙ-I, wherein Xaa₁ is either threonine (T) or glutamic acid (E); Xaa₂ is either alanine (A) or glutamic acid (E); and Xaa₅ is either tryptophan (W) or leucine (L) (SEQ ID NO:111). In another embodiment, an IL-1 signature domain includes the following amino acid sequence motif: F-Xaa₁-S-A-Xaa₂-Xaa₃-P-Xaa₄-Xaa₅-Xaaₙ-L, wherein Xaa represents any amino acid, and n is about 5-25 amino acid residues, more preferably about 6-18 amino acid residues, and more preferably about 6-15 amino acid residues (SEQ ID NO:94). Preferably, the IL-1 signature domain includes the following amino acid sequence: F-Xaa₁-S-A-Xaa₂-Xaa₃-P-Xaa₄-Xaa₅-Xaaₙ-L, wherein Xaa₁ is either threonine (T) or glutamic acid (E); Xaa₂ is either alanine (A) or glutamic acid (E); and Xaa₅ is either tryptophan (W) or leucine (L) (SEQ ID NO:95). In yet another embodiment, the IL-1 signature domain is at least about 10-30 amino acid residues in length, preferably 15-25 amino acid residues in length, preferably 17-24 amino acid residues, 19-23 amino acid residues or more preferably 21-22 amino acid residues in length and has at least about 30-60% identity, preferably at least about 35-55% identity, more preferably at least about 40-50% identity, and more preferably at least about 46-49% identity with an IL-1 signature domain of a protein of the invention having an amino acid sequence as set forth in SEQ ID NO:90 (e.g., amino acid residues 58-80), SEQ ID NO:102 (e.g., amino acid residues 130-151), SEQ ID NO:105 (e.g., amino acid residues 169-190), or SEQ ID NO:113 (e.g., amino acid residues 120-142).

[0353] In a preferred embodiment, a protein of the invention, preferably a SPOIL protein, contains an IL-1 signature domain of SEQ ID NO:90 (e.g., amino acid residues 58-80), SEQ ID NO:102 (e.g., amino acid residues 130-151), SEQ ID NO:105 (e.g., amino acid residues 169-190), or SEQ ID NO:113 (e.g., amino acid residues 120-142).

[0354] In another embodiment of the invention, a SPOIL protein is identified based on the presence of at least one “SPOIL signature motif” in the protein or corresponding nucleic acid molecule. As used herein, the term “SPOIL signature motif” includes an amino acid sequence which contains amino acid residues that are conserved among SPOIL family members. In one embodiment, a SPOIL signature motif, referred to herein as a “short SPOIL signature motif”, includes an amino acid sequence at least about 35-55 amino acid residues, preferably about 38-50 amino acid residues, more preferably about 40-48 amino acid residues, more preferably 42-46 amino acid residues, and more preferably 44 amino acid residues in length and having the following amino acid sequence: Q-Xaa₁-Xaa₂-E-Xaa₃-Xaa₄-I-M-Xaa₅-Xaa₆-Y-Xaa₇-Xaa₈-Xaa₉-E-P-V-K-Xaa₁₀-Xaa₁ₗ-L-F-Y-Xaa₁₂-Xaa₁₃-K-Xaa₁₄-G-Xaa₁₅-T-S-T-Xaa₁₆-E-S-Xaa₁₇-A-F—P-Xaa₁₈-W-F-1-A, wherein Xaa₁-18 is any amino acid (set forth in SEQ ID NO:109). Accordingly, preferred proteins include the conserved amino acid residues of the above-recited SPOIL signature motif. Proteins including at least 30, 31, 32, 33, 34, 35, 36, 37, 38, 39, 40, 41, 42, or 43 conserved amino acid residues of the above-recited SPOIL signature motif are also considered to be within the scope of the present invention.

[0355] In another embodiment, a SPOIL signature motif, referred to herein as a “long SPOIL signature motif” includes an amino acid sequence of at least about 58-78 amino acid residues, preferably about 61-74 amino acid residues, more preferably about 63-72 amino acid residues, more preferably 65-70 amino acid residues, and more preferably 67-68 amino acid residues in length and having the following amino acid sequence: Q-Xaa₁-Xaa₂-E-Xaa₃-Xaa₄-I-M-Xaa₅-Xaa₆-Y-Xaa₇-Xaa₈-Xaa₉-E-P-V-K-Xaa₁₀-Xaa₁₁-L-F-Y-Xaa₁₂-Xaa₁₃-K-Xaa₁₄-G-Xaa₁₅-T-S-T-Xaa₁₆-E-S-Xaa₁₇-A-F-P-Xaa₁₈-W-F-I-A-Xaa₁₉-Xaa₂₀-Xaa₂₁-Xaa₂₂-Xaa₂₃-Xaa₂₄-Xaa₂₅-P-Xaa₂₆-I-L-T-Xaa₂₇-E-L-G-Xaa₂₈-Xaa₂₉-Xaa₃₀-Xaa₃₁-T-Xaa₃₂-F-E, wherein Xaa₁₋₂₄ and ₂₆₋₃₂ is any amino acid Xaa is no amino acid or any amino acid (set forth in SEQ ID NO:110). A preferred protein includes the conserved amino acid residues of the above-recited SPOIL signature motif. Proteins including at least 56, 57, 58, 59, 60, 61, 62, 63, 64, 65, or 66 conserved amino acid residues of the above-recited SPOIL signature motif are also considered to be within the scope of the present invention.

[0356] Table III depicts the conserved amino acid residues of the SPOIL signature motifs set forth in SEQ ID NO:109 and SEQ ID NO:110. The conserved amino acid residues are numbered according to their position in the SPOIL signature motif as well as by their relative amino acid position in each of murine SPOIL-I, murine SPOIL-II, human SPOIL-I and human SPOIL-II. As used herein, the amino acid residues in each of the SPOIL proteins “correspond to” the relative amino acid residues in a SPOIL signature motif.

TABLE III

| Residue in | correspond- | correspond- | correspond- | correspond- |
|---|---|---|---|---|
| SPOIL | ing | ing | ing | ing |
| signature | residue in | residue in | residue in | residue in |
| motif | muSPOIL-I | muSPOIL-II | huSPOIL-I | huSPOIL-II |
| Gln1 | Gln26 | Gln88 | Gln98 | Gln137 |
| Glu4 | Glu29 | Glu91 | Glu101 | Glu140 |
| Ile7 | Ile32 | Ile94 | Ile104 | Ile143 |
| Met8 | Met33 | Met95 | Met105 | Met144 |
| Tyr11 | Tyr36 | Tyr98 | Tyr108 | Tyr147 |
| Glu15 | Glu40 | Glu102 | Glu112 | Glu151 |
| Pro16 | Pro41 | Pro103 | Pro113 | Pro152 |
| Val17 | Val42 | Val104 | Val114 | Val153 |
| Lys18 | Lys43 | Lys105 | Lys115 | Lys154 |
| Leu21 | Leu46 | Leu108 | Leu118 | Leu157 |
| Phe22 | Phe47 | Phe109 | Phe119 | Phe158 |
| Tyr23 | Tyr48 | Tyr110 | Tyr120 | Tyr159 |
| Lys26 | Lys51 | Lys113 | Lys123 | Lys162 |
| Gly28 | Gly53 | Gly115 | Gly125 | Gly164 |
| Thr30 | Thr55 | Thr117 | Thr127 | Thr166 |
| Ser31 | Ser56 | Ser118 | Ser128 | Ser167 |
| Thr32 | Thr57 | Thr119 | Thr129 | Thr168 |
| Glu34 | Glu59 | Glu121 | Glu131 | Glu170 |
| Ser35 | Ser60 | Ser122 | Ser132 | Ser171 |
| Ala37 | Ala62 | Ala124 | Ala134 | Ala173 |
| Phe38 | Phe63 | Phe125 | Phe135 | Phe174 |
| Pro39 | Pro64 | Pro126 | Pro136 | Pro175 |
| Trp41 | Trp66 | Trp128 | Trp138 | Trp177 |
| Phe42 | Phe67 | Phe129 | Phe139 | Phe178 |
| Ile43 | Ile68 | Ile130 | Ile140 | Ile179 |
| Ala44 | Ala69 | Ala131 | Ala141 | Ala180 |
| Pro51 | Pro77 | Pro139 | Pro148 | Pro187 |
| Ile53 | Ile79 | Ile141 | Ile150 | Ile189 |
| Leu54 | Leu80 | Leu142 | Leu151 | Leu190 |
| Thr55 | Thr81 | Thr143 | Thr152 | Thr191 |
| Glu57 | Glu83 | Glu145 | Glu154 | Glu193 |
| Leu58 | Leu84 | Leu146 | Leu155 | Leu194 |
| Gly59 | Gly85 | Gly147 | Gly156 | Gly195 |
| Thr64 | Thr90 | Thr152 | Thr161 | Thr200 |
| Phe66 | Phe92 | Phe154 | Phe163 | Phe202 |
| Glu67 | Glu93 | Glu155 | Glu164 | Glu203 |

[0357] Another embodiment of the invention features proteins having a “SPOIL unique domain”. As used herein, a “SPOIL unique domain” is at least about 134-150 amino acid residues in length and has at least about 45-50% identity with amino acid residues 66-206 of SEQ ID NO:105. In another embodiment, the SPOIL unique domain is at least about 136-148 amino acid residues, preferably about 138-146 amino acid residues, more preferably 140-144 amino acid residues, and more preferably 141, 142, or 143 amino acid residues in length and has at least about 55-60%, preferably about 65-70%, and more preferably about 75%, 80%, 85%, 90%, 95%, 98%, 99%, or 100% identity with amino acid residues 66-206 of SEQ ID NO:105. In a preferred embodiment, the SPOIL unique domain is from about amino acid residues 66-206 of human SPOIL-II shown in SEQ ID NO:105. In another preferred embodiment, the SPOIL unique domain is from about amino acid residues 27-167 of human SPOIL-I shown in SEQ ID NO:102. In yet another preferred embodiment, the SPOIL unique domain is from about amino acid residues 17-158 of murine SPOIL-II shown in SEQ ID NO:113.

[0358] Another embodiment of the invention features proteins having a “SPOIL C-terminal unique domain”. As used herein, a “SPOIL C-terminal unique domain” is at least about 58-78 amino acid residues in length and has at least about 45-50% identity with amino acid residues 137-203 of SEQ ID NO:105. In another embodiment, the SPOIL C-terminal unique domain is at least about 61-74 amino acid residues, preferably about 63-72 amino acid residues, more preferably 65-70 amino acid residues, and more preferably 67-68 amino acid residues in length and has about 55-60%, preferably about 65-70%, and more preferably about 75%, 80%, 85%, 90%, 95%, 98%, 99%, or 100% identity with amino acid residues 137-203 of SEQ ID NO:105. In one embodiment, the C-terminal unique domain is located within the C-terminal 70 amino acids of the full-length protein, preferably within the C-terminal 80 amino acid residues of the protein, more preferably within the C-terminal 90 amino acid residues of the protein, and even more preferably within the C-terminal 100, 120, 140, 160 or 180 amino acid residues of the full-length protein. In a preferred embodiment, the SPOIL C-terminal unique domain is from about amino acid residues 137-203 of human SPOIL-II shown in SEQ ID NO:105. In another preferred embodiment, the SPOIL C-terminal unique domain is from about amino acid residues 98-164 of human SPOIL-I shown in SEQ ID NO:102. In another preferred embodiment, the SPOIL C-terminal unique domain is from about amino acid residues 26-93 of murine SPOIL-I shown in SEQ ID NO:90. In yet another preferred embodiment, the SPOIL C-terminal unique domain is from about amino acid residues 88-155 of murine SPOIL-II shown in SEQ ID NO:113.

[0359] Another embodiment of the invention features a protein of the invention, preferably a SPOIL protein, which contain a signal sequence. As used herein, a “signal sequence” refers to a peptide containing about 17 amino acids which occurs at the N-terminus of secretory proteins and which contains a large number of hydrophobic amino acid residues. For example, a signal sequence contains at least about 13-22 amino acid residues, preferably about 15-20 amino acid residues, more preferably about 16-19 amino acid residues, and more preferably about 17 amino acid residues, and has at least about 35-65%, preferably about 38-50%, and more preferably about 40-45% hydrophobic amino acid residues (e.g., Valine, Leucine, Isoleucine or Phenylalanine). Such a “signal sequence”, also referred to in the art as a “signal peptide”, serves to direct a protein containing such a sequence to a lipid bilayer. For example, in one embodiment, a SPOIL protein contains a signal sequence containing about amino acids 1-17 of SEQ ID NO:90.

[0360] In yet another embodiment, a protein of the invention, preferably a SPOIL protein, encodes a mature protein. As used herein, the term “mature protein” refers to a protein of the invention, preferably a SPOIL protein, from which the signal peptide has been cleaved. In an exemplary embodiment, a mature SPOIL protein contains amino acid residues 1 to 81 of SEQ ID NO:93. In a preferred embodiment, a SPOIL protein is a mature SPOIL protein which includes an IL-1 signature domain. In yet another embodiment, a SPOIL protein is a mature protein which includes a SPOIL signature motif and/or a SPOIL C-terminal unique domain.

[0361] Preferred proteins of the present invention, preferably SPOIL proteins, have an amino acid sequence sufficiently homologous to the amino acid sequence of SEQ ID NO:90; SEQ ID NO:93; SEQ ID NO:102, SEQ ID NO:105, SEQ ID NO:113, the amino acid sequence encoded by the DNA insert of the plasmid deposited with ATCC as Accession Number 98883, or the amino acid sequence encoded by the DNA insert of the plasmid deposited with ATCC as Accession Number 98984. As used herein, the term “sufficiently homologous” refers to a first amino acid or nucleotide sequence which contains a sufficient or minimum number of identical or equivalent (e.g., an amino acid residue which has a similar side chain) amino acid residues or nucleotides to a second amino acid or nucleotide sequence such that the first and second amino acid or nucleotide sequences share common structural domains or motifs and/or a common functional activity. For example, amino acid or nucleotide sequences which share common structural domains have at least 45% or 50% identity, preferably 60% identity, more preferably 70%-80%, and even more preferably 90-95% identity across the amino acid sequences of the domains and contain at least one and preferably two structural domains or motifs, are defined herein as sufficiently homologous. Furthermore, amino acid or nucleotide sequences which share at least 45% or 50%, preferably 60%, more preferably 70-80%, or 90-95% identity and share a common functional activity are defined herein as sufficiently homologous.

[0362] As used interchangeably herein a “SPOIL activity”, “biological activity of SPOIL” or “functional activity of SPOIL”, refers to an activity exerted by a SPOIL protein, polypeptide or nucleic acid molecule on a SPOIL responsive cell as determined in vivo, or in vitro, according to standard techniques. In one embodiment, a SPOIL activity is a direct activity, such as an association with a target protein, preferably a SPOIL target molecule (e.g., a cell-surface or internalized IL-1 or SPOIL receptor). In another embodiment, a SPOIL activity is an indirect activity, such as inhibiting the synthesis or activity of a second protein (e.g., a protein of a signal pathway). In a preferred embodiment, a SPOIL activity is at least one or more of the following activities: (i) interaction of a SPOIL protein in the extracellular milieu with a protein molecule on the surface of the same cell which secreted the SPOIL protein molecule (e.g., a SPOIL receptor or IL-1 receptor); (ii) interaction of a SPOIL protein in the extracellular milieu with a protein molecule on the surface of a different cell from that which secreted the SPOIL protein molecule (e.g., a SPOIL receptor or IL-1 receptor); (iii) complex formation between a SPOIL protein and a cell-surface receptor; (iv) interaction of a SPOIL protein with a target molecule in the extracellular milieu (e.g., a soluble target molecule); (v) interaction of the SPOIL protein with an intracellular target molecule (e.g., interaction with an internalized or endocytosed receptor or ligand-coupled receptor); and (vi) complex formation with at least one, preferably two or more, intracellular target molecules.

[0363] In yet another preferred embodiment, a SPOIL activity is at least one or more of the following activities: (1) modulating, for example, antagonizing a signal transduction pathway (e.g., an IL-1-dependent or SPOIL-dependent pathway; (2) modulating cytokine production and/or secretion (e.g., production and/or secretion of a proinflammatory cytokine); (3) modulating lymphokine production and/or secretion; (4) modulating production of adhesion molecules and/or cellular adhesion; (5) modulating expression or activity of nuclear transcription factors; (6) modulating secretion of IL-1; (7) competing with IL-1 to bind an IL-1 receptor; (8) competing with a SPOIL protein (e.g., a SPOIL-I or SPOIL-II family member) to bind a SPOIL receptor; (9) modulating nuclear translocation of internalized IL-1 or SPOIL receptor or ligand-complexed receptor; (10) modulating cell proliferation, development or differentiation, for example, IL-1-stimulated or a SPOIL protein-stimulated proliferation, development or differentiation (e.g., of an epithelial cell, for example, a squamous epithelial cell of the esophagus, or of a skin cell, e.g., a keratinocyte); (11) modulating cell proliferation, development or differentiation of an osteogenic cell (e.g., of an osteoclast precursor cell, osteoclast and/or osteoblast); (12) modulating function of an osteogenic cell (e.g., osteoblast and/or osteoclast function); (13) modulating bone formation, bone metabolism and/or bone homeostasis (e.g., inhibiting bone resorption); (14) modulating cellular immune responses; (15) modulating cytokine-mediated proinflammatory actions (e.g., inhibiting acute phase protein synthesis by hepatocytes, fever, and/or prostaglandin synthesis, for example PGE₂ synthesis); and (16) promoting and/or potentiating wound healing.

[0364] The present invention is based, at least in part, on the discovery of a family of SPOIL proteins (e.g., SPOIL-I and SPOIL-II proteins) sharing certain conserved structural features (e.g., a SPOIL signature motif, an IL-1 signature domain, a SPOIL C-terminal unique domain). Moreover, it has been discovered that SPOIL proteins exist as multiple isoforms, presumably due to alternative splicing of one or more common genes. For example, SPOIL proteins having internal inserted amino acid segments have been identified (e.g., human SPOIL-II includes a segment of at least 40 amino acid residues not appearing in human SPOIL-I). SPOIL proteins have also been identified which may function as both secreted and intracellular molecules (e.g., murine SPOIL-I has a signal sequence which is not found in murine SPOIL-II). Therefore, additional SPOIL family members can be identified based on the nucleotide and amino acid sequence information provided herein which, e.g., via alternative splicing of genomic SPOIL sequences, have unique combinations of the structural features defined herein. For example, secreted isoforms of human SPOIL can be identified which include all, or a portion of the amino acid sequences set forth as SEQ ID NOs:102 and 105.

[0365] Moreover, SPOIL family members can be identified based on unique nucleotide and/or amino acid sequences found in one SPOIL family member as compared to a second SPOIL family member. For example, a comparison between the nucleotide sequences of murine SPOIL-I (SEQ ID NO:89) and murine SPOIL-II (SEQ ID NO:112) reveals that murine SPOIL-II includes a fragment from nucleotides 225 to 364 that is absent from murine SPOIL-I (SEQ ID NO:89). Moreover, a comparison of the amino acid sequences of murine SPOIL-I (SEQ ID NO:90) and murine SPOIL-II (SEQ ID NO:113) reveals that murine SPOIL-II includes a fragment from amino acids 1 to 90 that is absent from murine SPOIL-I. Accordingly, one embodiment of the present invention includes an isolated nucleic acid molecule including nucleotides 225 to 364 of SEQ ID NO:112. In another embodiment, an isolated nucleic acid molecule of the present invention includes at least 30 contiguous nucleotides of SEQ ID NO:112 from nucleotides 225 to 364. In another embodiment, an isolated nucleic acid molecule of the present invention includes at least 20-140, 30-130, 40-120, 50-110, 60-100, 70, 80, or 90 contiguous nucleotides of SEQ ID NO:112 from nucleotides 225 to 364. In yet another embodiment, an isolated nucleic acid molecule of the present invention has at least about 50% identity to nucleotides 225 to 364 of SEQ ID NO:112. In yet another embodiment, an isolated nucleic acid molecule has at least 50% identity to at least 30 contiguous nucleotides of SEQ ID NO:112 from nucleotides 224 to 364. In yet another embodiment, an isolated nucleic acid molecule of the invention hybridizes under stringent conditions to nucleotides 225 to 364 of SEQ ID NO:112. In yet another embodiment, an isolated nucleic acid molecule hybridizes under stringent conditions to at least 30 contiguous nucleotides of SEQ ID NO:112 from nucleotides 225 to 364.

[0366] Another embodiment of the present invention pertains to a polypeptide including amino acids 1 to 90 of SEQ ID NO:113. In yet another embodiment, the polypeptide includes at least 30 contiguous amino acids of SEQ ID NO:113 from amino acids 1 to 90 of SEQ ID NO:113. In yet another embodiment, the polypeptide includes at least 10-90, 20-80, 30-70, 40, 50 or 60 contiguous amino acids of SEQ ID NO:113 from amino acids 1 to 90. Yet another embodiment of the invention pertains to a polypeptide having at least 50% identity to amino acids 1 to 90 of SEQ ID NO:113. In yet another embodiment, the polypeptide has at least 50% identity to at least 10-90, 20-80, 30-70, 40, 50 or 60 contiguous amino acids of SEQ ID NO:113 from amino acids 1 to 90. Yet another embodiment of the present invention features isolated nucleic acid molecules encoding any of the polypeptides described herein.

[0367] Likewise, a comparison between the nucleic acid sequences of human SPOIL-I (SEQ ID NO:101) and human SPOIL-II (SEQ ID NO:104) reveals that human SPOIL-II includes a fragment from nucleotides 153 to 269 that is absent from human SPOIL-I (SEQ ID NO:101). Moreover, a comparison of the amino acid sequences of human SPOIL-I (SEQ ID NO:102) and human SPOIL-II (SEQ ID NO:105) reveals that human SPOIL-II includes a fragment from amino acids 19 to 58 that is absent from human SPOIL-I. Accordingly, one embodiment of the present invention includes an isolated nucleic acid molecule including nucleotides 153 to 269 of SEQ ID NO:112. In another embodiment, an isolated nucleic acid molecule of the present invention includes at least 30 contiguous nucleotides of SEQ ID NO:112 from nucleotides 153 to 269. In another embodiment, an isolated nucleic acid molecule of the present invention includes at least 20-140, 30-130, 40-120, 50-110, 60-100, 70, 80, or 90 contiguous nucleotides of SEQ ID NO:104 from nucleotides 153 to 269. In yet another embodiment, an isolated nucleic acid molecule of the present invention has at least about 50% identity to nucleotides 153 to 269 of SEQ ID NO:104. In yet another embodiment, an isolated nucleic acid molecule has at least 50% identity to at least 30 contiguous nucleotides of SEQ ID NO:104 from nucleotides 224 to 364. In yet another embodiment, an isolated nucleic acid molecule of the invention hybridizes under stringent conditions to nucleotides 153 to 269 of SEQ ID NO:104. In yet another embodiment, an isolated nucleic acid molecule hybridizes under stringent conditions to at least 30 contiguous nucleotides of SEQ ID NO:104 from nucleotides 153 to 269.

[0368] Another embodiment of the present invention includes a polypeptide including amino acids 19 to 58 of SEQ ID NO:105. In yet another embodiment, the invention features a polypeptide which includes at least 30 contiguous amino acids of SEQ ID NO:105 from amino acids 19 to 58 of SEQ ID NO:105. In yet another embodiment, the polypeptide includes at least 10-90, 20-80, 30-70, 40, 50 or 60 contiguous amino acids of SEQ ID NO:105 from amino acids 19 to 58. In yet another embodiment, the polypeptide has at least 50% identity to amino acids 19 to 58 of SEQ ID NO:105. In yet another embodiment, the polypeptide has at least 50% identity to at least 10-90, 20-80, 30-70, 40, 50 or 60 contiguous amino acids of SEQ ID NO:105 from amino acids 19 to 58. Yet another embodiment of the present invention features isolated nucleic acid molecules encoding any of the polypeptides described herein.

[0369] Given the existence of both secreted and intracellular SPOIL molecules (e.g., SPOIL-I and II isoforms) described herein, it will be appreciated that the SPOIL molecules of the present invention and modulators of SPOIL proteins are useful, for example, in regulating cellular responses triggered by extracellular events (e.g., by interaction of, for example, a cytokine (e.g., IL-1) or a SPOIL protein with a cell surface receptor. For example, it is known that unbalanced production of IL-1 is associated with the pathogenesis of various inflammatory diseases. Accordingly, SPOIL proteins and/or SPOIL modulators may be useful as therapeutic agents in achieving homeostasis and ameliorating such imbalances.

[0370] Likewise, it will be appreciated that the SPOIL molecules of the present invention and modulators of SPOIL proteins are useful in regulating cytokine (e.g., IL-1) and/or SPOIL protein dependent intracellular responses (e.g., acting as intracellular antagonists or agonists). For example, it is known that cytokines (e.g., IL-1) are not secreted from certain cell types, for example, skin cells, e.g., keratinocytes, and accordingly, there exist a discreet subset of intracellular cytokine-dependent responses and a corresponding set of intracellular SPOIL protein-dependent activities.

[0371] Moreover, SPOIL molecules of the present invention have been found to be constitutively expressed, for example, in epithelial cells, in particular in the squamous epithelium of the esophagus and the epithelial lining of the mouth (e.g., murine SPOIL-II was isolated from an esophageal cDNA library). In addition, expression of SPOIL molecules can also be induced in certain cell types and tissues. For example, the human SPOILs were isolated from a stimulated keratinocyte library and human SPOIL-I was expressed in keratinocytes induced with PMA, ionomycin, TNF and cyclohexamide. In addition, human SPOIL-I was observed in monocytic cells stimulated with LPS and expression of SPOIL-I was induced in the kidneys of lippopolysaccharide (LPS)-injected mice. Furthermore, expression has been correlated with certain proliferative disorders. For example, human SPOIL-I was found to be expressed on human esophageal tumor samples and overexpressed in squamous cell carcinoma of the esophagus. It has further been demonstrated that a secreted form of SPOIL (e.g., murine SPOIL-I), when expressed in vivo, caused impairment of osteoclast differentiation and/or function as well as evidence of impaired bone resorption (see EXAMPLE 25).

[0372] Accordingly, in another embodiment of the invention, a SPOIL molecule or preferably, a SPOIL modulator, is useful for regulating, preventing and/or treating at least one or more of the following diseases or disorders: (1) inflammatory diseases and disorders including, but not limited to inflammation, septic shock, arthritis, intercolitis, and pneumonitis; (2) epithelial cell and/or skin diseases and disorders including, but not limited to proliferative disorders (e.g., skin cancers including, but not limited to, melanoma, and Kaposi's sarcoma, and other epithelial cancers including squamous cell carcinoma, esophageal cancer and cancer of the mouth and/or throat); (3) bone-related and/or bone resorption disorders including, but not limited to osteoporosis, Paget's disease, osteoarthritis, degenerative arthritis, osteogenesis imperfecta, fibrous displasia, hypophosphatasia, bone sarcoma, myeloma bone disorder (e.g., osteolytic bone lesions) and hypercalcemia; and (4) diseases and disorders that involve the bowel and are characterized by the production of inflammation and at times, ulceration in the small or large bowel, including but not limited to, inflammatory bowl disease (IBD) (e.g., Crohn's disease, irritable bowel syndrome (IBS) and ulcerative colitis). Moreover, it will be appreciated that the SPOIL molecules and SPOIL modulators are useful for the following purposes: (1) regulation of bone mass (e.g., increase bone mass and/or inhibit bone loss); (2) management of bone fragility (e.g., decrease bone fragility); and (3) prevention and/or treatment of bone pain, bone deformities, and/or bone fractures.

[0373] Another embodiment of the invention features isolated SPOIL proteins and polypeptides having a conserved SPOIL structural feature and a SPOIL activity, as defined herein. Preferred SPOIL proteins have an IL-1 signature domain and a SPOIL activity. In one embodiment, the SPOIL protein has a signal peptide, an IL-1 signature domain, and a SPOIL activity. In another preferred embodiment, the SPOIL protein has a signal peptide, an IL-1 signature domain, a SPOIL activity, and an amino acid sequence sufficiently homologous to an amino acid sequence of SEQ ID NO:90; SEQ ID NO:102, SEQ ID NO:105, SEQ ID NO:113, the amino acid sequence encoded by the DNA insert of the plasmid deposited with ATCC as Accession Number 98883, or the amino acid sequence encoded by the DNA insert of the plasmid deposited with ATCC as Accession Number 98984.

[0374] Another embodiment of the invention features isolated SPOIL proteins and polypeptides having a SPOIL activity, a SPOIL signature motif (short or long form) and/or SPOIL unique domain. In another embodiment, the SPOIL protein has a SPOIL activity, a SPOIL signature motif (short or long form) and/or SPOIL C-terminal unique domain. In another preferred embodiment, the SPOIL protein has a SPOIL activity, a SPOIL signature motif (short or long form) and/or SPOIL C-terminal unique domain, and an amino acid sequence sufficiently homologous to an amino acid sequence of SEQ ID NO:90; SEQ ID NO:102, SEQ ID NO:105, SEQ ID NO:113, the amino acid sequence encoded by the DNA insert of the plasmid deposited with ATCC as Accession Number 98883, or the amino acid sequence encoded by the DNA insert of the plasmid deposited with ATCC as Accession Number 98984. The above-described SPOIL proteins can further include an IL-1 signature domain as described herein.

[0375] In a particularly preferred embodiment, the SPOIL protein and nucleic acid molecules of the present invention are human SPOIL molecules. A nucleotide sequence of the isolated human SPOIL-I cDNA and the predicted amino acid sequence of the human SPOIL-I protein are shown in SEQ ID NOs:101 and 102, respectively. In addition, the nucleotide sequence corresponding to the coding region of the human SPOIL-I cDNA (nucleotides 124 to 630) is represented as SEQ ID NO:103.

[0376] The human SPOIL-I cDNA, which is approximately 1291 nucleotides in length, encodes a protein which is approximately 169 amino acid residues in length. A plasmid containing the full length nucleotide sequence encoding human SPOIL-I (clone designation Epjthkf 035f11) was deposited under the provisions of the Budapest Treaty with the American Type Culture Collection (ATCC), presently in Manassas, Va., on Sep. 11, 1998 and assigned Accession Number 98883. The human SPOIL-I protein contains an IL-1 signature domain, which can be found, for example, from about amino acids 130 to 151 of SEQ ID NO:102 (Leu130 to Leu151 of the human SPOIL-I amino acid sequence). The human SPOIL-I protein further contains a SPOIL signature motif, which can be found, for example, from about amino acids 98-141 (short) of from about 98-164 (long) of SEQ ID NO:102 (Gln98 to Ala141 or Gln98 to Glu164 of the human SPOIL-I amino acid sequence). A SPOIL C-terminal unique domain can be found in the human SPOIL-I protein, for example, from about amino acid residues 98-164 of SEQ ID NO:102 (Gln98 to Glu164 of the human SPOIL-I amino acid sequence).

[0377] A nucleotide sequence of the isolated human SPOIL-II cDNA and the predicted amino acid sequence of the human SPOIL-II protein are shown in SEQ ID NOs:106 and 107, respectively. In addition, the nucleotide sequence corresponding to the coding region of the human SPOIL-II cDNA (nucleotides 98-721) is represented as SEQ ID NO:106.

[0378] The human SPOIL-II cDNA, which is approximately 1377 nucleotides in length, encodes a protein which is approximately 208 amino acid residues in length. A plasmid containing the full length nucleotide sequence encoding human SPOIL-II (clone designation Epjthkf 074e01) was deposited under the provisions of the Budapest Treaty with the American Type Culture Collection (ATCC), presently in Manassas, Va., on Nov. 11, 1998 and assigned Accession Number 98984. The human SPOIL-II protein contains an IL-1 signature domain, which can be found, for example, from about amino acids 169-190 of SEQ ID NO:102 (Leu169 to Leu190 of the human SPOIL-II amino acid sequence). The human SPOIL-II protein further contains a SPOIL signature motif, which can be found, for example, from about amino acids 137-180 (short) of from about 137-203 (long) of SEQ ID NO:105 (Gln137 to Ala180 or Gln137 to Glu203 of the human SPOIL-II amino acid sequence). A SPOIL C-terminal unique domain can be found in the human SPOIL-II protein, for example, from about amino acid residues 137-203 of SEQ ID NO:105 (Gln137 to Glu203 of the human SPOIL-II amino acid sequence), having 100% identity to the SPOIL C-terminal unique domain of human SPOIL-I.

[0379] In another embodiment, the SPOIL protein and nucleic acid molecules of the present invention are murine SPOIL molecules. A nucleotide sequence of the isolated murine SPOIL-I cDNA and the predicted amino acid sequence of the murine SPOIL-I protein are shown in SEQ ID NOs:89 and 90, respectively. In addition, the nucleotide sequences corresponding to the coding region of the murine SPOIL-I cDNA (nucleotides 135-428) and the SPOIL-I cDNA encoding the mature SPOIL-I protein are represented as SEQ ID NO:91 and SEQ ID NO:92, respectively.

[0380] The murine SPOIL-I cDNA (set forth in SEQ ID NO:89), which is approximately 746 nucleotides in length, encodes a protein having a molecular weight of approximately 10.96 kD (with signal sequence) and 9.1 kD (without signal sequence) and which is approximately 98 amino acid residues in length (SEQ ID NO:90). The murine SPOIL-I protein contains an IL-1 signature domain as defined herein, which can be found, for example, from about amino acids 58 to 80 of SEQ ID NO:90 and, for example, from about amino acids 41-63 of SEQ ID NO:93. The murine SPOIL-I protein further contains a SPOIL signature motif, which can be found, for example, from about amino acids 26-69 (short) of from about 26-93 (long) of SEQ ID NO:90 (Gln26 to Ala69 or Gln26 to Glu93 of the murine SPOIL-I amino acid sequence). A SPOIL C-terminal unique domain can be found in the murine SPOIL-I protein, for example, from about amino acid residues 26-93 of SEQ ID NO:105 (Gln26 to Glu93 of the murine SPOIL-I amino acid sequence), having 52.2% identity to the SPOIL C-terminal unique domain of human SPOIL-I. (Comparison can be made using, for example, the Lipman-Pearson Algorithm (Lipman and Pearson (1985) Science 227:1435-1441, with a K-tuple of 2, a Gap Penalty of 4, and a Gap Weight Penalty of 12. In addition, the murine SPOIL-I protein can contain a signal sequence. A signal sequence can be found at least, for example, from about amino acids 1-17 of SEQ ID NO:90. The prediction of such a signal peptide can be made, for example, utilizing the computer algorithm SignalP (Henrik, et al. (1997) Protein Engineering 10:1-6).

[0381] The entire amino acid sequence of SEQ ID NO:90 was subcloned into retroviral vector MSCVneo (Hawley, et al. (1994) Gene Therapy 1:136-138) and used for retroviral delivery. Bone marrow infected with the retroviral vector expressing murine SPOIL-I was transplanted into irradiated mice recipients. Bones removed from these mouse recipients, histologically, appeared thicker than the bones of control mice. In addition, spleen cells (i.e., a source of osteoclast progenitors) which were removed from mice recipients and were cultured on a bone marrow cell line, demonstrated reduced osteoclast production than the spleen cells of control mice. These experiments are discussed in further detail herein.

[0382] According to in situ analysis of mouse tissues, in the tissues tested, SPOIL-I mRNA transcript is expressed almost exclusively in the squamous cell epithelium of the esophagus and in the epithelial lining of the mouth. Northern blot analysis of human tissues confirms this pattern of SPOIL expression with transcripts being detected in esophagus with expression also likely in the trachea, among the tissues tested. In addition, SPOIL is also present on human esophageal tumor samples and overexpressed in moderately differentiated squamous cell carcinoma of the esophagus.

[0383] A multiple sequence alignment of the amino acid sequences of murine SPOIL-I with murine IL-1ra (Swiss-Prot™ Accession No. P25085) (SEQ ID NO:98), as well as murine IL-1α (Swiss-Prot™ Accession No. P01582) (SEQ ID NO:99) and murine (Swiss-Prot™ Accession No. P10749) (SEQ ID NO:100) was generated using MegAlign™ sequence alignment software (refer to FIG. 4).

[0384] A nucleotide sequence of the isolated murine SPOIL-II cDNA and the predicted amino acid sequence of the murine SPOIL-II protein are shown in SEQ ID NOs:112 and 113, respectively. In addition, the nucleotide sequences corresponding to the coding region of the murine SPOIL-II cDNA (nucleotides 96-575) is represented as SEQ ID NO:114. The murine SPOIL-II cDNA (set forth in SEQ ID NO:112), which is approximately 838 nucleotides in length, encodes a protein which is approximately 160 amino acid residues in length (SEQ ID NO:113). The murine SPOIL-II protein contains an IL-1 signature domain as defined herein, which can be found, for example, from about amino acids 120 to 142 of SEQ ID NO:113. The murine SPOIL-II protein further contains a SPOIL signature motif, which can be found, for example, from about amino acids 88-131 (short) of from about 88-155 (long) of SEQ ID NO:113 (Gln88 to Ala131 or Gln88 to Glu155 of the murine SPOIL-II amino acid sequence). A SPOIL C-terminal unique domain can be found in the murine SPOIL-II protein, for example, from about amino acid residues 88-155 of SEQ ID NO:113 (Gln88 to Glu155 of the murine SPOIL-II amino acid sequence), having 52.2% identity to the SPOIL C-terminal unique domain of human SPOIL-I.

[0385] A multiple sequence alignment of the amino acid sequences of human SPOIL-I (corresponding to amino acid residues 1-169 of SEQ ID NO:102), human SPOIL-II (corresponding to amino acid residues 1-208 of SEQ ID NO:105), murine SPOIL-I (corresponding to amino acid residues 1-98 of SEQ ID NO:90), and murine SPOIL-II (corresponding to amino acid residues 1-160 of SEQ ID NO:113) is shown in FIG. 6.

[0386] A multiple sequence alignment of the amino acid sequences of murine SPOIL-I, murine SPOIL-II, human SPOIL-I, and human SPOIL-II with murine IL-1ra (Swiss-Prot™ Accession No. P25085) (SEQ ID NO:98), as well as murine (Swiss-Prot™ Accession No. P01582) (SEQ ID NO:99) and murine IL-1β (Swiss-Prot™ Accession No. P10749) (SEQ ID NO:100) is shown in FIG. 7. (The alignments of FIGS. 4, 6, and 7 were generated using MegAlign™ sequence alignment software using the Clustal algorithm). The initial pairwise alignment parameters are set to a K-tuple of 1, a GAP penalty of 3, a window of 5, and diagonals saved set to =5. The multiple alignment parameters are set at a GAP penalty of 10, and a GAP length penalty of 10.)

### NEOKINE

[0387] Cytokines are small peptide molecules produced by a variety of cells that mediate a wide range of biological activities. Arai et al. (1990) Annu. Rev. Biochem. 59:783 and Paul and Seder (1994) Cell 76:241. Through a complex network, cytokines regulate functions including cellular growth, inflammation, immunity, differentiation and repair. Mosmann (1991) Curr. Opin. Immunol. 3:311. One superfamily of cytokines, termed the chemokine superfamily, is a large group of more than 30 small proteins, many of which play a role in the selective recruitment and activation of leukocytes during inflammation. Wells and Peitsch (1997) J. Leukoc. Biol. 61:5. The chemokine superfamily can be subdivided into two groups based on the arrangement of the first two of four conserved cysteines, which are either separated by one amino acid (CXC chemokines) or adjacent (CC chemokines). Baggiolini et al. (1995) Int. J. Immunopharmacol. 17:2. IL-8 and the other CXC chemokines act preferentially on neutrophils, while the CC chemokines (MCP-1, MCP-2, MCP-3, RANTES, MIP-1 alpha and MIP-1 beta) act on monocytes, but not neutrophils, and have additional activities toward basophil and eosinophil granulocytes, and T-lymphocytes. Baggiolini et al., supra.

[0388] The CXC chemokine family of cytokines display disparate angiogenic activity depending upon the presence or absence of the ELR motif, a structural amino acid motif previously found to be important in receptor:ligand binding on neutrophils. CXC chemokines containing the ELR motif are potent angiogenic factors, inducing both in vitro endothelial chemotaxis and in vivo corneal neovascularization. In contrast, the CXC chemokines that lack the ELR motif including, PF4, IP-10, and MIG, not only fail to induce significant in vitro endothelial cell chemotaxis or in vivo corneal neovascularization, but are found to be potent angiostatic factors in the presence of CXC chemokines containing the ELR motif. Strieter et al. (1995) Shock 4:3. The CXC cytokines have a signature pattern which spans the region that includes the four conserved cysteine residues. A CXC-signature pattern has been generated from the consensus of multiple CXC chemokines. The signature pattern has been assigned Prosite Signature PS00471.

[0389] The present invention is based on the discovery of family of molecules, referred to herein as NEOKINE protein and nucleic acid molecules. The NEOKINEs are members of the non-ELR-CXC subfamily of chemokines (a shortening of chemoattractant cytokines). The CXC-chemokines display four highly conserved cysteine amino acid residues, with the first two cysteines separated by one non-conserved amino acid residue. The cloning of the NEOKINE family of CXC chemokines revealed at least three atypical features which distinguish them from previously characterized chemokines. These are (1) the presence of approximately 5 residues between the third and fourth conserved cysteine residues which are absent from other CXC chemokines; (2) the fewest residues preceeding the predicted amino terminus of the mature form of any naturally-occurring chemokine; and (3) a general dissimilarity to all other chemokines in the region between the second and third conserved cysteines. Phylogenetic analysis of known chemokines (e.g., known CXC as well as CC chemokines) further demonstrates that NEOKINE is unique from other chemokines subfamilies identified to date although it is clearly a related chemokine.

[0390] The family of NEOKINE chemokines described herein include human, murine, rat and macaque NEOKINE-1. Upon comparison of the sequences for each species orthologue, it was noticed that the NEOKINE-1 chemokines displayed a remarkable degree of identity beteewn orthologues. For example, human NEOKINE-1 is 92% identical at the amino acid level to murine NEOKINE-1 (as determined using a Lipman-Pearson algorithm (Lipman and Pearson (1985) Science 227:1435-1441, Ktuple=2, Gap Penalty=4, Gap Length Penalty=12).

[0391] The present invention is also based on the discovery that NEOKINE is the surrogate ligand for a previously-identified orphan receptor known in the art as RDC1. RDC1 was first identified as one of four orphan receptors cloned from a dog thyroid cDNA library based on homology to the seven-transmembrane helice-containing G-protein coupled receptors (Libert et al. (1989) Science 244:569-572). Three of these, RDC4, RDC7, and RDC8 have since been identified as 5-HT_{1D}, adenosine A₁ and adenosine A₂ receptors, respectively (Maenhaut et al. (1991) Biochem. Biophys. Res. Commun. 173:1169-1178; Libert et al. (1991) EMBO J. 10:1677-1682; and Maenhaut et al. (1991) Biochem. Biophys. Res. Commun. 180:1460-1468). A human orthologue of the fourth orphan, termed GPRN1, was subsequently cloned which was initially proposed to be the receptor for vasoactive intestinal peptide (“VIP”) (Sreedharan et al. (1991) Proc. Nat'l. Acad. Sci. USA 88:4986-4990). This finding has more recently been refuted (Nagata et al. (1992) Trends Biochem. Sci. 13:102-103; and Cook et al. (1992) FEBS Lett. 300:149-152), leaving the receptor orphaned. Recent reports have characterized the tissue expression of RDC1/GPRN1 receptor (Law and Rosenzweig (1994) Biochem. Biophys. Res. Commun. 201:458-465) and have identified and characterized a murine homologue of RDC1/GPRN1 (Heesen et al. (1998) Immunogenetics 47:364-370).

[0392] Sequence comparison of human and murine RDC1/GPRN1 reveals that these orthologues exhibit remarkable sequence identity as is the case with species orthologues of NEOKINE. Moreover, phylogenetic analysis of chemokine receptors demonstrates that RDC1/GPRN1 is a unique but distantly related member of the CXC subfamily of chemokine receptors. Given the remarkable sequence identity between species orthologues of NEOKINE and between orthologues of RDC1/GPRN1, as well as the unique positions which both NEOKINE and RDC1/GPRN1 fall on their respective phylogenetic trees, it has been determined that the NEOKINE is the surrogate ligand for the previously orphaned RDC1/GPRN1 receptor.

[0393] The term “family” when referring to the protein and nucleic acid molecules of the invention is intended to mean two or more proteins or nucleic acid molecules having a common structural domain and having sufficient amino acid or nucleotide sequence homology as defined herein. Such family members can be naturally occurring and can be from either the same or different species. For example, a family can contain a first protein of human origin, as well as other, distinct proteins of human origin or alternatively, can contain homologues of non-human origin. Members of a family may also have common functional characteristics.

[0394] In one embodiment, the NEOKINE proteins of the present invention are proteins having an amino acid sequence of about 75-125, preferably about 80-120, more preferably about 85-115, more preferably about 90-110, and even more preferably about 95-105 amino acids containing 3-7, preferably 5-6, and more preferably 4 cysteine residues which are conserved between family members. In another embodiment, a NEOKINE family member is identified based on the presence of at least one “NEOKINE CXC signature motif” in the protein or corresponding nucleic acid molecule. As used herein, the term “NEOKINE CXC signature motif” refers to a protein domain having an amino acid sequence of about 35-65, preferably about 40-60, more preferably about 45-55 amino acid residues, and even more preferably at least about 48-50 amino acids containing 3-7, preferably 5-6, and more preferably 4 cysteine residues which are conserved between family members, the first three residues of the NEOKINE CXC signature motif having the sequence C-X-C (“CXC”), wherein X is any amino acid and C is cysteine. In a preferred embodiment, a NEOKINE CXC signature motif has the pattern X (0-2)-C-X-C-X (20-24)-C-X (17-24)-C-X (0-2) (SEQ ID NO:185), wherein X is any amino acid and C is cysteine. In another preferred embodiment, a NEOKINE CXC signature motif has the pattern X (0-2)-C-X-C-X (23, 24)-C-X (20, 21)-C-X (2) (SEQ ID NO:186), wherein X is any amino acid and C is cysteine. In another preferred embodiment, a NEOKINE CXC signature motif has the pattern X (0-2)-C-X-C-X (6,7)-[LIVMFY]-X (2)-[RKSEQ]-X-[LIVM]-X (2)-[LIVM]-X (8)-C-X (4)-[LIVM] (2)-X (13,14)-C-[LIVM]-X (SEQ ID NO:187). In another preferred embodiment, a NEOKINE CXC signature motif has the pattern X (0, 1)-[RIC]-C4R1CK-X(4)-P-X(4, 5)-[ED]-X(6)-[KR]-X(5)-C-[DE](2)-X-[LIVMFY](4)-X (12,13)-H-C-[LIVM]-H (SEQ ID NO:188). The motifs described herein, are described according to standard Prosite Signature designation (e.g., X (0-2) designates any amino acid, n=0-2; X (6, 7) designates any amino acid, n=6 or 7; and [LIVM] indicates any one of Leu, Ile, Val, or Met. All amino acids are described using universal single letter abbreviations according to these motifs. In a preferred embodiment, the N-terminal amino acid of the NEOKINE CXC signature motif is the N-terminal amino acid of the mature NEOKINE protein:

[0395] Accordingly, in one embodiment, a NEOKINE protein is human NEOKINE-1 which contains a NEOKINE CXC signature motif containing about amino acids 25-72 of SEQ ID NO:116 having the sequence CXC at amino acid residues 25-27, and having 4 conserved cysteine residues at the positions indicated in FIG. 8. In another embodiment, a NEOKINE protein is murine NEOKINE-1 which contains a NEOKINE CXC signature motif containing about amino acids 25-72 of SEQ ID NO:119 having the sequence CXC at amino acid residues 25-27, and having 4 conserved cysteine residues at the positions indicated in FIG. 8. In another embodiment, a NEOKINE protein is rat NEOKINE-1 which contains a NEOKINE CXC signature motif containing at least amino acids 4-51 of SEQ ID NO:122, having 4 conserved cysteine residues at the positions indicated in FIG. 8. In another embodiment, a NEOKINE protein is macaque NEOKINE-1 which contains a NEOKINE CXC signature motifcontaining at least amino acids 20-67 of SEQ ID NO:135, having 4 conserved cysteine residues at the positions indicated in FIG. 8.

[0396] In another embodiment of the invention, a NEOKINE protein has at least one NEOKINE CXC signature motif and a signal sequence. As used herein, a “signal sequence” refers to a peptide containing about 20 amino acids which occurs at the N-terminus of secretory and integral membrane proteins and which contains a majority of hydrophobic amino acid residues. For example, a signal sequence contains at least about 14-28 amino acid residues, preferably about 16-26 amino acid residues, more preferably about 18-24 amino acid residues, and more preferably about 20-22 amino acid residues, and has at least about 40-70%, preferably about 50-65%, and more preferably about 55-60% hydrophobic amino acid residues (e.g., Alanine, Valine, Leucine, Isoleucine, Phenylalanine, Tyrosine, Tryptophan, or Proline). Such a “signal sequence”, also referred to in the art as a “signal peptide”, serves to direct a protein containing such a sequence to a lipid bilayer. For example, in one embodiment, a NEOKINE-1 protein contains a signal sequence of about amino acids 1-22 of SEQ ID NO:116. In another embodiment, a NEOKINE-2 protein contains a signal sequence of about amino acids 1-22 of SEQ ID NO:119. In another embodiment, a NEOKINE-2 protein contains a signal sequence of about amino acids 1-17 of SEQ ID NO:135.

[0397] Accordingly, one embodiment of the invention features a NEOKINE protein having at least a NEOKINE CXC signature motif. Another embodiment features a NEOKINE protein having at least a NEOKINE CXC signature motif and a signal peptide.

[0398] Preferred NEOKINE molecules of the present invention have an amino acid sequence sufficiently homologous to the amino acid sequence of SEQ ID NO:116, SEQ ID NO:119, SEQ ID NO:122, or SEQ ID NO:125. As used herein, the term “sufficiently homologous” refers to a first amino acid or nucleotide sequence which contains a sufficient or minimum number of identical or equivalent (e.g., an amino acid residue which has a similar side chain) amino acid residues or nucleotides to a second amino acid or nucleotide sequence such that the first and second amino acid or nucleotide sequences share common structural domains and/or a common functional activity. For example, amino acid or nucleotide sequences which share common structural domains have at least about 50% homology, preferably 60% homology, more preferably 70%-80%, and even more preferably 90-95% homology across the amino acid sequences of the domains and contain at least one and preferably two structural domains, are defined herein as sufficiently homologous. Furthermore, amino acid or nucleotide sequences which share at least 50%, preferably 60%, more preferably 70-80, or 90-95% homology and share a common functional activity are defined herein as sufficiently homologous.

[0399] As used interchangeably herein, an “NEOKINE activity”, “biological activity of NEOKINE” or “functional activity of NEOKINE”, refers to an activity exerted by a NEOKINE protein, polypeptide or nucleic acid molecule on a NEOKINE responsive cell as determined in vivo, or in vitro, according to standard techniques. In one embodiment, a NEOKINE activity is a direct activity, such as an association with a NEOKINE-target molecule. As used herein, a “target molecule” or “binding partner” is a molecule with which a NEOKINE protein binds or interacts in nature, such that NEOKINE-mediated function is achieved. A NEOKINE target molecule can be a non-NEOKINE molecule or a NEOKINE protein or polypeptide of the present invention. In an exemplary embodiment, a NEOKINE target molecule is a carbohydrate molecule on the cell membrane (e.g., heparan sulfate). In another exemplary embodiment, a NEOKINE target molecule is a membrane-bound protein (e.g., a “NEOKINE receptor”).

[0400] In another embodiment, a NEOKINE target is a membrane-bound chemokine receptor. In another embodiment, a NEOKINE target is an protein molecule (e.g., a “NEOKINE binding partner”). In such an exemplary embodiment, a NEOKINE binding partner can be an non-NEOKINE protein or a second NEOKINE protein molecule of the present invention. Alternatively, a NEOKINE activity is an indirect activity, such as a cellular signaling activity mediated by interaction of the NEOKINE protein with a second protein (e.g., a NEOKINE receptor or a receptor specific for another chemokine).

[0401] In one embodiment, a NEOKINE activity is at least one or more of the following activities: (i) interaction of a NEOKINE protein with a membrane-bound NEOKINE receptor (e.g., RDC1); (ii) interaction of a NEOKINE protein with a membrane-bound chemokine receptor; (iii) indirect interaction of a NEOKINE protein with an intracellular protein via a membrane-bound NEOKINE receptor (e.g., RDC1); (iv) indirect interaction of a NEOKINE protein with an intracellular protein via a membrane-bound chemokine receptor; (v) complex formation between a soluble NEOKINE protein and a NEOKINE binding partner; (vi) inhibition of the interaction of chemokines (e.g., pro-inflammatory chemokines) by binding to their cognate receptors; (vii) inhibition of the binding of HIV to HIV co-receptors; and (vii) inhibition of the binding of HIV to HIV co-receptors wherein said binding induces subsequent infection of susceptible cells.

[0402] In another embodiment, a NEOKINE activity is at least one or more of the following activities: (1) modulation of cellular signal transduction, either in vitro or in vivo; (2) regulation of gene transcription in a cell expressing a NEOKINE receptor or a chemokine receptor; (3) regulation of gene transcription, in a cell expressing a NEOKINE receptor (e.g., RDC1) or a chemokine receptor, wherein said cell is involved in angiogenesis or inflammation; (4) regulation of angiogenesis; (5) regulation of angiogenesis, wherein said regulation comprises inhibibition of angiogenesis; (6) regulation of angiogenesis, wherein said regulation comprises maintenance of angiostasis; (7) regulation of inflammation; (8) inhibition of chemoattraction (e.g., neutrophil chemoattraction); and (9) inhibition of pro-inflammatory chemokines by binding to their cognate receptors.

[0403] In a preferred embodiment of the invention a NEOKINE or NEOKINE modulator is useful for regulating, preventing and/or treating at least one or more of the following proliferative diseases or disorders: (1) cancers of the epithelia (e.g., carcinomas of the pancreas, stomach, liver, secretory glands (e.g., adenocarcinoma) bladder, lung, breast, skin (e.g., malignant melanoma), reproductive tract including prostate gland, ovary, cervix and uterus); (2) cancers of the hematopoietic and immune system (e.g., leukemias and lymphomas); (3) cancers of the central nervous, brain system and eye (e.g., gliomas, neuroblastoma and retinoblastoma); and (4) cancers of connective tissues, bone, muscles and vasculature (e.g., sarcomas).

[0404] In yet another embodiment of the invention, a NEOKINE or NEOKINE modulator is useful for regulating, preventing and/or treating at least one or more of the following diseases or disorders: (1) inflammation; (2) psoriasis; (3) immune rejection following skin graft; (4) immune rejection following kidney transplant; (5) kidney inflammation in acute renal failure; (6) brain inflammation following stroke or ischaemia; and (7) brain inflammation following viral infection.

[0405] Accordingly, another embodiment of the invention features isolated NEOKINE proteins and polypeptides having a NEOKINE activity. Preferred NEOKINE proteins have at least one NEOKINE CXC signature motif and a NEOKINE activity. In another preferred embodiment, a NEOKINE protein further comprises a signal sequence. In still another preferred embodiment, a NEOKINE protein has a NEOKINE CXC signature motif, a NEOKINE activity, and an amino acid sequence sufficiently homologous to an amino acid sequence of SEQ ID NO:116, SEQ ID NO:119, SEQ ID NO:122, or SEQ ID NO:125.

[0406] The human NEOKINE-1 cDNA, which is approximately 1564 nucleotides in length, encodes a protein which is approximately 99 amino acid residues in length. The human NEOKINE-1 protein contains at least a NEOKINE CXC signature motif. A NEOKINE CXC signature motif can be found at least, for example, from about amino acids 25-72 of SEQ ID NO:116. The human NEOKINE-1 protein is predicted to be a secreted protein which further contains a signal sequence at about amino acids 1-22 of SEQ ID NO:116. The prediction of such a signal peptide can be made, for example, utilizing the computer algorithm SIGNALP (Henrik, et al. (1997) Protein Engineering 10:1-6).

[0407] The murine NEOKINE-1 cDNA, which is approximately 1564 nucleotides in length, encodes approximately 99 amino acid residues of the murine NEOKINE-1 protein. The murine NEOKINE-1 protein contains a NEOKINE CXC signature motif. A NEOKINE CXC signature motif can be found at least, for example, from about amino acids 25-72 of SEQ ID NO:119. The murine NEOKINE-1 protein is predicted to be a secreted protein which further contains a signal sequence at about amino acids 1-22 of SEQ ID NO:119.

[0408] The rat NEOKINE-1 cDNA, which is approximately 1372 nucleotides in length, encodes approximately 79 amino acid residues of the rat NEOKINE-1 protein. The rat NEOKINE-1 protein contains a NEOKINE CXC signature motif. A NEOKINE CXC signature motif comprises at least about amino acids 4-51 of SEQ ID NO:122. The rat NEOKINE-1 protein is predicted to be a secreted protein.

[0409] The macaque NEOKINE-1 cDNA, which is approximately 1458 nucleotides, encodes approximately 94 amino acid residues of the macaque NEOKINE-1 protein. The macaque NEOKINE-1 protein contains a NEOKINE CXC signature motif. A NEOKINE CXC signature motif comprises at least about amino acids 20-67 of SEQ ID NO:135. The macaque NEOKINE-1 protein is predicted to be a secreted protein which further contains a signal sequence including at least amino acids 1-17 of SEQ ID NO:135.

### TANGO 129

[0410] Members of the tumor necrosis factor (TNF) superfamily and their receptors, both of which are expressed on activated T cells and elsewhere, are thought to play an important role in T-cell activation and stimulation, cell proliferation and differentiation, as well as apoptosis.

[0411] Proteins that are members of the TNF superfamily initiate signal transduction by binding to receptors, members of the TNF receptor (TNFR) superfamily, which lack intrinsic catalytic activity. This is in marked contrast epidermal growth factor and platelet-derived growth factor both of which bind to receptors having an intracellular tyrosine kinase domain which causes receptor autophosphorylation and initiates downstream phosphorylation events.

[0412] Members of the TNFR superfamily carry out signal transduction by interacting with members of the Janus or JAK family of tyrosine kinases. In turn, JAK family members interact with STAT (signal transducers and activators of transcription) family members, a class of transcriptional activators.

[0413] The present invention is based on the discovery of a cDNA molecule encoding human TANGO129 (T129), a member of the TNF receptor superfamily.

[0414] A nucleotide sequence encoding a human T129 protein is shown in SEQ ID NO:137; and SEQ ID NO:139 (open reading frame only). A predicted amino acid sequence of T129 protein is also shown in SEQ ID NO:138.

[0415] The T129 cDNA of SEQ ID NO:137, which is approximately 2570 nucleotides long including untranslated regions, encodes a protein amino acid having a molecular weight of approximately 46 kDa (excluding post-translational modifications).

[0416] Alignment of the TNFR/NGFR cysteine-rich domain of human T129 protein (SEQ ID NO:142) with a TNFR/NGFR cysteine-rich domain consensus derived from a hidden Markov model (PF00020; SEQ ID NO:5), revealed some similarity.

[0417] An approximately 3.0 kb T129 mRNA transcript is expressed at a moderate level in peripheral blood leukocytes, spleen, and skeletal muscle. Lower levels of this transcript were observed in heart, brain, and placenta. Human T129 is one member of a family of molecules (the “T129 family”) having certain conserved structural and functional features. The term “family” when referring to the protein and nucleic acid molecules of the invention is intended to mean two or more proteins or nucleic acid molecules having a common structural domain and having sufficient amino acid or nucleotide sequence identity as defined herein. Such family members can be naturally occurring and can be from either the same or different species. For example, a family can contain a first protein of human origin and a homologue of that protein of murine origin, as well as a second, distinct protein of human origin and a murine homologue of that protein. Members of a family may also have common functional characteristics.

[0418] In one embodiment, a T129 protein includes a TNFR/NGFR domain having at least about 65%, preferably at least about 75%, and more preferably about 85%, 95%, or 98% amino acid sequence identity to the TNFR/NGFR domain of SEQ ID NO:141.

[0419] Preferred T129 polypeptides of the present invention have an amino acid sequence sufficiently identical to the TNFR/NGFR domain amino acid sequence of SEQ ID NO:141. As used herein, the term “sufficiently identical” refers to a first amino acid or nucleotide sequence which contains a sufficient or minimum number of identical or equivalent (e.g., an amino acid residue which has a similar side chain) amino acid residues or nucleotides to a second amino acid or nucleotide sequence such that the first and second amino acid or nucleotide sequences have a common structural domain and/or common functional activity. For example, amino acid or nucleotide sequences which contain a common structural domain having about 65% identity, preferably 75% identity, more preferably 85%, 95%, or 98% identity are defined herein as sufficiently identical.

[0420] As used interchangeably herein a “T129 activity”, “biological activity of T129” or “functional activity of T129”, refers to an activity exerted by a T129 protein, polypeptide or nucleic acid molecule on a T129 responsive cell as determined in vivo, or in vitro, according to standard techniques. A T129 activity can be a direct activity, such as an association with or an enzymatic activity on a second protein or an indirect activity, such as a cellular signaling activity mediated by interaction of the T129 protein with a second protein. In a preferred embodiment, a T129 activity includes at least one or more of the following activities: (i) interaction with proteins in the T129 signaling pathway (ii) interaction with a T129 ligand; or (iii) interaction with an intracellular target protein.

[0421] Accordingly, another embodiment of the invention features isolated T129 proteins and polypeptides having a T129 activity.

[0422] Yet another embodiment of the invention features T129 molecules which contain a signal sequence. Generally, a signal sequence (or signal peptide) is a peptide containing about 20 amino acids which occurs at the extreme N-terminal end of secretory and integral membrane proteins and which contains large numbers of hydrophobic amino acid residues and serves to direct a protein containing such a sequence to a lipid bilayer.

### A259

[0423] The A259 proteins and nucleic acid molecules comprise a family of molecules having certain conserved structural and functional features. As used herein, the term “family” is intended to mean two or more proteins or nucleic acid molecules having a common structural domain and having sufficient amino acid or nucleotide sequence identity as defined herein. Family members can be from either the same or different species. For example, a family can comprises two or more proteins of human origin, or can comprise one or more proteins of human origin and one or more of non-human origin. Members of the same family may also have common structural domains.

[0424] For example, A259 proteins of the invention have signal sequences. As used herein, a “signal sequence” includes a peptide of at least about 15 or 20 amino acid residues in length which occurs at the N-terminus of secretory and membrane-bound proteins and which contains at least about 70% hydrophobic amino acid residues such as alanine, leucine, isoleucine, phenylalanine, proline, tyrosine, tryptophan, or valine. In a preferred embodiment, a signal sequence contains at least about 10 to 40 amino acid residues, preferably about 15-30 amino acid residues, more preferably about 22 amino acid residues, and has at least about 60-80%, more preferably 65-75%, and more preferably at least about 70% hydrophobic residues. A signal sequence serves to direct a protein containing such a sequence to a lipid bilayer. Thus, in one embodiment, an A259 protein contains a signal sequence at about amino acids 1 to 22 of SEQ ID NO:147 (SEQ ID NO:149). The signal sequence is cleaved during processing of the mature protein.

[0425] In another example, an A259 family member also includes one or more of the following domains: (1) an extracellular domain; (2) a transmembrane domain; and (3) a cytoplasmic domain. Thus, in one embodiment, an A259 protein contains an extracellular domain at about amino acids 1 to 1141 of SEQ ID NO:147 (SEQ ID NO:150). In another embodiment, an A259 protein contains a transmembrane domain at about amino acids 1142 to 1164 of SEQ ID NO:147 (SEQ ID NO:159). In another embodiment, an A259 protein contains a cytoplasmic domain at about amino acids 1165 to 1188 of SEQ ID NO:147 (SEQ ID NO:160).

[0426] In one embodiment, the extracellular domain of A259 can include an inserted domain (“I” domain). In another embodiment, the I domain is located between integrin α-subunit repeat domains 2 and 3.

[0427] In a preferred embodiment, an A259 family member has the amino acid sequence of SEQ ID NO:147 wherein the extracellular domain is located at about amino acids 1 to 1141 (SEQ ID NO:150), the I domain (SEQ ID NO:151) is located at about amino acid positions 164 to 345, and the integrin α-subunit repeat domains on either side of the I domain (integrin a-subunit repeat domains 2 and 3) are located at amino acid positions 115 to 157 (SEQ ID NO:153) and 367 to 392 (SEQ ID NO:154), respectively.

[0428] An A259 family member can include one or more integrin a-subunit repeat domains within the extracellular domain. As used herein, a “repeat domain” refers to one or more of seven homologous protein domains that are conserved in integrin α-subunit family members, which are about 10 to 65 residues, preferably about 20 to 50 residues, more preferably about 25 to 45 amino acid residues, and most preferably about 26 to 43 residues, in length, and which are about 10 to 50, preferably about 15 to 40, more preferably about 20 to 35 amino acids apart from one another.

[0429] A repeat domain typically has one of the two following consensus sequences. The first repeat consensus sequence (type 1) is: F-G-Xaa(n)-[G or A]-A-[P or L or Q] (SEQ ID NO:189), wherein F is phenylalanine, G is glycine, Xaa is any amino acid, n is about 10 to 30 amino acid residues, preferably about 15 to 20 amino acid residues, more preferably about 16 to 19 amino acid residues, A is alanine, P is proline, L is leucine, and Q is glutamine. The second repeat consensus sequence (type 2) is: [G or S]-[F or Y]-Xaa(n)-[G or V or L]-[A or M]-[P or Y] (SEQ ID NO:190), wherein G is glycine, S is serine, F is phenylalanine, Y is tyrosine, Xaa is any amino acid, n is about 5 to 40 amino acid residues, preferably about 10 to 35 amino acid residues, more preferably about 14 to 33 amino acid residues, V is valine, A is alanine, M is methionine, and P is proline.

[0430] In one embodiment, an A259 family member includes one or more repeat domains having an amino acid sequence that is at least about 55%, preferably at least about 65%, more preferably at least about 75%, yet more preferably at least about 85%, and most preferably at least about 95% identical to amino acids 39 to 74, and/or 115 to 157, and/or 367 to 392, and/or 421 to 455, and/or 478 to 516, and/or 540 to 575, and/or 602 to 640 of SEQ ID NO:147, which are the repeat domains of A259 (these repeat domains are also represented as SEQ ID NO:152, 153, 154, 155, 156, 157, and 158, respectively). In another embodiment, an A259 family member includes one or more repeat domains having an amino acid sequence that is at least about 55%, preferably at least about 65%, more preferably at least about 75%, yet more preferably at least about 85%, and most preferably at least about 95% identical to amino acids 39 to 74, and/or 115 to 157, and/or 367 to 392, and/or 421 to 455, and/or 478 to 516, and/or 540 to 575, and/or 602 to 640 of SEQ ID NO:147, which are the repeat domains of A259 (these repeat domains are also represented as SEQ ID NO:152, 153, 154, 155, 156, 157, and 158, respectively), and has one or more repeat consensus sequences described herein. In another embodiment, an A259 family member includes one or more repeat domains having an amino acid sequence that is at least about 55%, preferably at least about 65%, more preferably at least about 75%, yet more preferably at least about 85%, and most preferably at least about 95% identical to amino acids 39 to 74, and/or 115 to 157, and/or 367 to 392, and/or 421 to 455, and/or 478 to 516, and/or 540 to 575, and/or 602 to 640 of SEQ ID NO:147, which are the repeat domains of A259 (these repeat domains are also represented as SEQ ID NO:152, 153, 154, 155, 156, 157, and 158, respectively), has one or more I consensus sequences described herein, and has at least one A259 biological activity as described herein.

[0431] An A259 family member can also include an inserted, or I domain (also called von Willebrand factor type A domain). As used herein, an “I domain” refers to a domain that appears in only some of the integrin α subunits, e.g., a1, a2, aM, and aX, and that is inserted between the second and third integrin α-subunit repeat domains. I domains prevent the occurrence of proteolytic cleavage that separates integrin α subunits into heavy and light fragments that are disulfide linked. An I domain includes about 100 to 300 amino acid residues, preferably about 150 to 200 amino acid residues, more preferably about 160 to 190 amino acid residues, and most preferably about 182 amino acid residues.

[0432] An I domain typically has the following consensus sequence: D-G-S-Xaa-S-Xaa(n1)-F-Xaa(n2)-Q-Y (SEQ ID NO:191), wherein D is aspartic acid, G is glycine, S is serine, Xaa is any amino acid, n1 is about 5 to 15, preferably about 8 to 12, more preferably about 9 to 11 amino acid residues, F is phenylalanine, n2 is about 15 to 30, preferably 18 to 28, more preferably about 20 to 26 amino acid residues, Q is glutamine, and Y is tyrosine.

[0433] In one embodiment, an A259 family member includes an I domain having an amino acid sequence that is at least about 55%, preferably at least about 65%, more preferably at least about 75%, yet more preferably at least about 85%, and most preferably at least about 95% identical to amino acids 164 to 345 of SEQ ID NO:147, which is the I domain of A259 (this I domain is also represented as SEQ ID NO:151). In another embodiment, an A259 family member includes an I domain having an amino acid sequence that is at least about 55%, preferably at least about 65%, more preferably at least about 75%, yet more preferably at least about 85%, and most preferably at least about 95% identical to amino acids 164 to 345 of SEQ ID NO:147, which is the I domain of A259 (this I domain is also represented as SEQ ID NO:151), and an I domain consensus sequence described herein. In another embodiment, an A259 family member includes an I domain having an amino acid sequence that is at least about 55%, preferably at least about 65%, more preferably at least about 75%, yet more preferably at least about 85%, and most preferably at least about 95% identical to amino acids 164 to 345 of SEQ ID NO:147, which is the I domain of A259 (this I domain is also represented as SEQ ID NO:151). In another embodiment, an A259 family member includes an I domain having an amino acid sequence that is at least about 55%, preferably at least about 65%, more preferably at least about 75%, yet more preferably at least about 85%, and most preferably at least about 95% identical to amino acids 164 to 345 of SEQ ID NO:147, which is the I domain of A259 (this I domain is also represented as SEQ ID NO:151), has one or more I domain consensus sequences described herein, and has at least one A259 biological activity as described herein.

[0434] An A259 family member can also include a cytoplasmic domain. The cytoplasmic domain typically includes about 10 to 40, preferably about 20 to 30, more preferably about 22 to 28, still more preferably about 22 to 26 amino acid residues in length. The A259 cytoplasmic domain typically has the following consensus sequence: [F or Y or W or S]-[R or K]-Xaa(n1)-G-F-F-Xaa(n2)-R (SEQ ID NO:192), wherein F is phenylalanine, Y is tyrosine, W is tryptophan, S is serine, R is arginine, K is lysine, Xaa is any amino acid, n1 and n2 are 0 to 1, and G is glycine.

[0435] In a preferred embodiment, an A259 family member has the amino acid sequence of SEQ ID NO:147 wherein the cytoplasmic domain is located at about amino acids 1165 to 1188 (SEQ ID NO:160) and the cytoplasmic domain consensus sequence is located from about amino acid 1165 to 1170.

[0436] Various features of human and murine A259 are summarized below.

### Human A259

[0437] A cDNA encoding human A259 was identified by analyzing the sequences of clones present in an LPS stimulated human primary osteoblast cDNA library. This analysis led to the identification of a clone, Atho002i17, encoding full-length human A259. The human A259 cDNA of this clone is 5042 nucleotides long (SEQ ID NO:145). The open reading frame of this cDNA, nucleotides 127 to 3690 of SEQ ID NO:145 (SEQ ID NO:146), encodes a 1188 amino acid receptor protein (SEQ ID NO:147).

[0438] The signal peptide prediction program SIGNALP (Nielsen et al. (1997) Protein Engineering 10:1-6) predicted that human A259 includes a 22 amino acid signal peptide (amino acid 1 to about amino acid 22 of SEQ ID NO:147; SEQ ID NO:149) preceding the mature A259 protein (corresponding to about amino acid 23 to amino acid 1188 of SEQ ID NO:147) (SEQ ID NO:148). The human A259 protein molecular weight is 133.5 kDa prior to the cleavage of the signal peptide, 131.1 kDa after cleavage of the signal peptide.

[0439] Human A259 includes a extracellular domain (about amino acids 1 to 1141 of SEQ ID NO:147; SEQ ID NO:150), an I domain (also called a Von Willebrand Factor type A domain; about amino acids 164 to 345 of SEQ ID NO:147; SEQ ID NO:151), seven repeat domains (about amino acids 39 to 74, 115 to 157, 367 to 392, 421 to 455, 478 to 516, 540 to 575, and 602 to 640 of SEQ ID NO:147 (SEQ ID NO:152, 153, 154, 155, 156, 157, and 158, respectively)), a transmembrane domain (about amino acids 1142 to 1164 of SEQ ID NO:147; SEQ ID NO:159), and a cytoplasmic domain (about amino acids 1165 to 1188 of SEQ ID NO:147; SEQ ID NO:160).

[0440] A slightly different model of the integrin alpha repeat domain identifies five integrin alpha repeat domains within human A259 (about amino acids 37-90, 421-472, 476-532, 538-593, and 600-654 of SEQ ID NO:147 (SEQ ID NOS:179, 180, 181, 182, and 183, respectively)). These domains were identified by homology searching using consensus domains derived from hidden Markov models (HMMs). HMMs can be used to do multiple sequence alignment and very sensitive database searching, using statistical descriptions of a sequence family's consensus. FIG. 12A depicts an alignment of amino acids 37-90 of human A259 (SEQ 113 NO:179) with a consensus integrin alpha repeat domain derived from a hidden Markov model (SEQ ID NO:184). FIG. 12B depicts an alignment of amino acids 421-472 of human A259 (SEQ ID NO:180) with a consensus integrin alpha repeat domain derived from a hidden Markov model (SEQ ID NO:184). FIG. 12C depicts an alignment of amino acids 476-532 of human A259 (SEQ ID NO:181) with a consensus integrin alpha repeat domain derived from a hidden Markov model (SEQ ID NO:184). FIG. 12D depicts an alignment of amino acids 538-593 of human A259 (SEQ ID NO:182) with a consensus integrin alpha repeat domain derived from a hidden Markov model (SEQ ID NO:184). FIG. 12E depicts an alignment of amino acids 600-654 of human A259 (SEQ ID NO:183) with a consensus integrin alpha repeat domain derived from a hidden Markov model (SEQ ID NO:184).

[0441] Predicted N-glycosylation sites are found from amino acids 82 to 85, 95 to 98, 291 to 294, 331 to 334, 358 to 361, 449 to 452, 462 to 465, 528 to 531, 642 to 645, 694 to 697, 857 to 860, 894 to 897, 973 to 976, 1031 to 1034, 1039 to 1042 and 1059 to 1062 of SEQ ID NO:147. A cAMP and cGMP-dependent protein kinase phosphorylation site is found from amino acids 700 to 703 of SEQ ID NO:147.

[0442] Predicted protein kinase C phosphorylation sites are found from amino acids 27 to 29, 97 to 99, 221 to 223, 287 to 289, 355 to 357, 434 to 436, 451 to 453, 530 to 532, 548 to 550, 587 to 589, 662 to 664, 703 to 705, 716 to 718, 770 to 772, 833 to 835, 938 to 940, 1092 to 1094, 1100 to 1102, 1171 to 1173 and 1183 to 1185 of SEQ ID NO:147.

[0443] Predicted casein kinase II phosphorylation sites are found from amino acids 161 to 164, 221 to 224, 230 to 233, 270 to 273, 287 to 290, 322 to 325, 485 to 488, 530 to 533, 548 to 551, 556 to 559, 593 to 596, 662 to 665, 696 to 669, 724 to 727, 753 to 756, 801 to 804, 938 to 941, 966 to 969, 974 to 977, 1046 to 1049, 1061 to 1064 and 1133 to 1136 of SEQ ID NO:147.

[0444] A predicted tyrosine kinase phosphorylation site is found from amino acids 812 to 820 of SEQ ID NO:147.

[0445] Predicted N-myristoylation sites are found from amino acids 6 to 11, 35 to 40, 106 to 111, 236 to 241, 245 to 250, 257 to 262, 354 to 359, 363 to 368, 379 to 384, 422 to 427, 473 to 478, 481 to 486, 543 to 548, 625 to 630, 690 to 695, 725 to 730, 877 to 882, 930 to 935 and 1147 to 1152 of SEQ ID NO:147.

[0446] A predicted amidation site is found from amino acids 257 to 260 of SEQ ID NO:147. An immunoglobulin and major histocompatibility complex proteins signature is found from amino acids 74 to 80 of SEQ ID NO:147.

[0447] Human A259 is homologous to human integrin α10 (SEQ ID NO:161; GenBank Accession Number AF074015), a β1-associated collagen binding integrin (Camper, Hellman, and Lundgren-Akerlund (1998) Journal of Biol. Chem. 273, 32:20383-20389). The human A259 signal sequence is represented by amino acids 1 to 22 (and encoded by nucleotides 127 to 192 of SEQ ID NO:145). The human α10 integrin signal sequence is represented by amino acids 1 to 22 (and encoded by nucleotides 22 to 87 of SEQ ID NO:161). The human A259 extracellular domain sequence (SEQ ID NO:150) is represented by amino acids 1 to 1141 (and encoded by nucleotides 127 to 3549 of SEQ ID NO:145), and the human α10 extracellular domain sequence is represented by amino acids 1 to 1098 (and encoded by nucleotides 22 to 3381 of SEQ ID NO:161). The human A259 I domain (SEQ ID NO:151) is represented by amino acids 164 to 345 (and encoded by nucleotides 616 to 1161 of SEQ ID NO:145), and the human α10 domain is represented by amino acids 140 to 337 (and encoded by nucleotides 505 to 1098 of SEQ ID NO:161). The human A259 transmembrane domain (SEQ ID NO:159) is represented by amino acids 1142 to 1164 (and encoded by nucleotides 3550 to 3618 of SEQ ID NO:145), and the human α10 transmembrane domain is represented by amino acids 1099 to 1123 (and encoded by nucleotides 3382 to 3456 of SEQ ID NO:161). The human A259 cytoplasmic domain (SEQ ID NO:160) is represented by amino acids 1165 to 1188 (and encoded by nucleotides 3619 to 3690 of SEQ ID NO:145), and the human α10 cytoplasmic domain is represented by amino acids 1124 to 1145 (and encoded by nucleotides 3457 to 3522 of SEQ ID NO:161).

[0448] Alignments have shown that there is an overall 46.3% identity between the full length human A259 nucleic acid molecule and the full length human α10 molecule, and a 43.0% identity between the A259 amino acid sequence and the human α10 amino acid sequence. There is also a 55.1% identity between the human A259 and the human α10 open reading frames. There is also an overall 37.6% amino acid identity, and a 41.5% full length nucleic acid identity, between the full length human A259 nucleic acid molecule and the full length human α1 (VLA-1 (very late antigen-1) molecule.

[0449] Human A259 is homologous to murine A259. The human A259 signal sequence is represented by amino acids 1 to 22 (and encoded by nucleotides 127 to 192 of SEQ ID NO:145). The murine A259 signal sequence is represented by amino acids 1 to 22 (and encoded by nucleotides 28 to 93 of SEQ ID NO:163). The human A259 extracellular domain sequence (SEQ ID NO:150) is represented by amino acids 1 to 1141 (and encoded by nucleotides 127 to 3549 of SEQ ID NO:145), and the murine A259 extracellular domain sequence is represented by amino acids 1 to 1141 (and encoded by nucleotides 28 to 3450 of SEQ ID NO:163). The human A259 I domain (SEQ ID NO:151) is represented by amino acids 164 to 345 (and encoded by nucleotides 616 to 1161 of SEQ ID NO:145), and the murine A259 I domain is represented by amino acids 164 to 345 (and encoded by nucleotides 517 to 1062 of SEQ ID NO:163). The human A259 repeat domains are represented by amino acids 39 to 74, 115 to 157, 367 to 392, 421 to 455, 478 to 516, 540 to 575, and 602 to 640 (and encoded by nucleotides 244 to 348, 469 to 597, 1225 to 1302, 1387 to 1491, 1558 to 1674, 1744 to 1851, and 1930 to 2046, respectively, of SEQ ID NO:145), and the murine A259 repeat domains are represented by amino acids 39 to 74, 115 to 157, 367 to 392, 421 to 455, 478 to 516, 540 to 575, and 602 to 640 (and encoded by nucleotides 145 to 249, 370 to 498, 1126 to 1203, 1288 to 1392, 1459 to 1575, 1645 to 1752, and 1831 to 1947, respectively, of SEQ ID NO:163). The human A259 transmembrane domain (SEQ ID NO:159) is represented by amino acids 1142 to 1164 (and encoded by nucleotides 3550 to 3618 of SEQ ID NO:145), and the murine A259 transmembrane domain is represented by amino acids 1142 to 1164 (and encoded by nucleotides 3283 to 3357 of SEQ ID NO:163). The human A259 cytoplasmic domain (SEQ ID NO:160) is represented by amino acids 1165 to 1188 (and encoded by nucleotides 3619 to 3690 of SEQ ID NO:145), and the murine A259 cytoplasmic domain is represented by amino acids 1165 to 1188 (and encoded by nucleotides 3358 to 3423 of SEQ ID NO:163).

[0450] Alignments show that there is an overall 78.4% identity between the full length human A259 nucleic acid molecule and the full length murine A259 molecule, and a 90.3% identity between the A259 amino acid sequence and the murine A259 amino acid sequence. There is also an 86.8% identity between the human and murine A259 open reading frames.

[0451] Clone Human I2, which encodes human A259, was deposited with the American Type Culture Collection (10801 University Boulevard, Manassas, Va. 20110-2209) on Apr. 2, 1999 and assigned Accession Number 207190. This deposit will be maintained under the terms of the Budapest Treaty on the International Recognition of the Deposit of Microorganisms for the Purposes of Patent Procedure. This deposit was made merely as a convenience for those of skill in the art and is not an admission that a deposit is required under 35 U.S.C, 112.

[0452] FIG. 10 depicts a hydropathy plot of human A259. Relatively hydrophobic regions of the protein are shown above the horizontal line, and relatively hydrophilic regions of the protein are below the horizontal line. The cysteine residues (cys) and predicted N-glycosylation sites are indicated by short vertical lines just below the hydropathy trace. The dashed vertical line separates the signal sequence (amino acids 1 to 22 of SEQ ID NO:147; SEQ ID NO:149) on the left from the mature protein (amino acids 23 to 1188 of SEQ ID NO:147; SEQ ID NO:148) on the right. The A259 transmembrane domain is indicated by the section of the plot under which the number 6.4 can be seen, which represents a score assigned to the predicted transmembrane domain. The extracellular domain (SEQ ID NO:150) and cytoplasmic domain (SEQ ID NO:160) are similarly indicated by gray horizontal bars, labeled as “out” and “in”, respectively.

[0453] An electronic survey of proprietary databases revealed that A259 is found in abundantly in human and mouse osteoblast cDNA libraries and also in human bone marrow and neuronal cDNA libraries. In addition, in a Northern blot containing RNA from human tissues, A259 was expressed as two messages, a 6 kb and a 4 kb message, in RNA from human osteoblasts. The sequence used to probe this human Northern blot contained human A259 C-terminal and 3′ untranslated regions. The expression level in human osteoblasts did not change when stimulated with TNF-α.

[0454] The expression of human A259 was measured in various clinical liver samples taken from subjects not suffering from liver fibrosis and from patients suffering from liver fibrosis using TaqMan quantitative PCR. The results of this analysis are depicted in FIG. 13A. Human A259 was expressed at a lower level in the livers of patients not suffering from liver fibrosis (A, B, and C; relative expression 0.13, 0.29, and 0.09, respectively) than in the livers of patients suffering from liver fibrosis (D, E, F, G, H, I, J, and K; relative expression 1.59, 0.50, 0.55, 1.56, 0.62, 0.93, 3.54, and 0.61, respectively).

[0455] The expression of human A259 was measured in various cells using TaqMan quantitative PCR. The results of this analysis are depicted in FIG. 13B. The cells tested were: heart (A; relative expression 1.69), lung (B; relative expression 0.41), liver (C; relative expression 0.10), passaged stellate cells (D; relative expression 36.15), quiescent stellate cells (E; relative expression 0.15), stellate cells (F; relative expression 18.71); stellate/F BS cells (G; relative expression 31.03), NHDF fibroblasts (H; relative expression 0.71); TGF-treated NHDF fibroblasts (I; relative expression 12.69); NHLF fibroblasts (J; relative expression 4.81); and TGF-treated NHLF fibroblasts (K; relative expression 66.06).

[0456] Human A259 maps to human chromosome location hu15q22. The flanking markers are AFM094YC1 and NIB1778. The nearby known disease loci include: CLN6 (neuronal ceroid-lipofuscinosis) and BBS4 (Bardet-Biedl Syndrome 4). The nearby known genes include: HDC (histidine decarboxylase), LIPC (hepatic lipase), PKM2 (pyruvate kinase 3), CLN6 (neuronal ceroid-lipofuscinosis), BBS4 (Bardet-Biedl Syndrome 4), and NMB (neuromedin B). The murine syntenic chromosomal location is mo9. The known nearby loci include: rc (rough coat), ash (ashen), flail (flailer), pml (promyelotic leukemia), and sty (small thymus). The known nearby genes include: hpl (hepatitic lipase).

### Murine A259

[0457] A cDNA encoding human A259 was identified by analyzing the sequences of clones present in a murine bone marrow cDNA library. This analysis led to the identification of a clone, AtmMa113d1, encoding full-length murine A259. The murine A259 cDNA of this clone is 4858 nucleotides long (SEQ ID NO:163). The open reading frame of this cDNA, nucleotides 28 to 3591 of SEQ ID NO:163 (SEQ ID NO:164), encodes a 1188 amino acid receptor protein (SEQ ID NO:165).

[0458] The signal peptide prediction program SIGNALP (Nielsen et al. (1997) Protein Engineering 10:1-6) predicted that murine A259 includes a 22 amino acid signal peptide (amino acid 1 to about amino acid 22 of SEQ ID NO:165) (SEQ ID NO:167) preceding the mature A259 protein (corresponding to about amino acid 23 to amino acid 1188 of SEQ ID NO:165) (SEQ ID NO:166). The mouse A259 protein molecular weight is 133.1 kDa prior to the cleavage of the signal peptide, 130.5 kDa after cleavage of the signal peptide.

[0459] Murine A259 includes a extracellular domain (about amino acids 1 to 1141 of SEQ ID NO:165; SEQ ID NO:168), an I domain (about amino acids 164 to 345 of SEQ ID NO:165; SEQ 169), seven repeat domains (about amino acids 39 to 74, 115 to 157, 367 to 392, 421 to 455, 478 to 516, 540 to 575, and 602 to 640 of SEQ ID NO:165 (SEQ ID NO:170, 171, 172, 173, 174, 175, and 176, respectively)), a transmembrane domain (about amino acids 1142 to 1164 of SEQ ID NO:165; SEQ ID NO:177), and a cytoplasmic domain (about amino acids 1165 to 1188 of SEQ ID NO:165; SEQ ID NO:178).

[0460] Predicted N-glycosylation sites are found from amino acids 82 to 85, 95 to 98, 291 to 294, 331 to 334, 358 to 361, 449 to 452, 462 to 465, 528 to 531, 642 to 645, 694 to 697, 857 to 860, 894 to 897, 973 to 976, 1031 to 1034, 1039 to 1042 and 1059 to 1062 of SEQ ID NO:165.

[0461] Predicted protein kinase C phosphorylation sites are found from amino acids 51 to 53, 97 to 99, 221 to 223, 287 to 289, 355 to 357, 434 to 436, 451 to 453, 530 to 532, 569 to 571, 716 to 718, 770 to 772, 833 to 835, 1092 to 1094, 1100 to 1102 and 1171 to 1173 of SEQ ID NO:165.

[0462] Predicted casein kinase II phosphorylation sites are found from amino acids 161 to 164, 221 to 224, 230 to 233, 270 to 273, 287 to 290, 322 to 325, 485 to 488, 530 to 533, 548 to 551, 556 to 559, 593 to 596, 696 to 669, 724 to 727, 753 to 756, 801 to 804, 859 to 862, 938 to 941, 966 to 969, 974 to 977, 1046 to 1049, 1061 to 1064 and 1133 to 1136 of SEQ ID NO:165.

[0463] A predicted tyrosine kinase phosphorylation site is found from amino acids 812 to 820.

[0464] Predicted N-myristoylation sites are found from amino acids 6 to 11, 106 to 111, 236 to 241, 245 to 250, 257 to 262, 354 to 359, 363 to 368, 379 to 384, 477 to 482, 543 to 548, 625 to 630, 690 to 695, 725 to 730, 1030 to 1035 and 1147 to 1152 of SEQ ID NO:165.

[0465] Predicted amidation site are found from amino acids 51 to 54 and 257 to 260 of SEQ ID NO:165.

[0466] Clone Mouse 12, which encodes murine A259, was deposited with the American Type Culture Collection (10801 University Boulevard, Manassas, Va. 20110-2209) on Apr. 2, 1999 and assigned Accession Number 207191. This deposit will be maintained under the terms of the Budapest Treaty on the International Recognition of the Deposit of Microorganisms for the Purposes of Patent Procedure. This deposit was made merely as a convenience for those of skill in the art and is not an admission that a deposit is required under 35 U.S.C. 112.

[0467] FIG. 11 depicts a hydropathy plot of murine A259. Relatively hydrophobic regions of the protein are shown above the horizontal line, and relatively hydrophilic regions of the protein are below the horizontal line. The cysteine residues (cys) and predicted N-glycosylation sites are indicated by short vertical lines just below the hydropathy trace. The dashed vertical line separates the signal sequence (amino acids 1 to 22 of SEQ ID NO:165; SEQ ID NO:167) on the left from the mature protein (amino acids 23 to 1188 of SEQ ID NO:165; SEQ ID NO:166) on the right. The A259 transmembrane domain is indicated by the section of the plot under which the number 6.4 can be seen, which represents a score assigned to the predicted transmembrane domain. The extracellular domain (SEQ ID NO:168) and cytoplasmic domain (SEQ ID NO:178) are similarly indicated by gray horizontal bars, labeled as “out” and “in”, respectively.

[0468] In situ data of A259 expression in mouse is summarized as follows: During embryogenesis, E13.5 through postnatal day 1.5 tested, all developing bone structures have strong expression. The signal is located mostly at the edge of the developing bones. Beginning at E14.5 the bone marrow space can be seen and is negative for expression. However, some large bones have signal in the bone, not just at the edge. Signal is also observed in the small intestine, diaphragm and to a lesser extent the muscle layer under the skin. The diaphragm and intestine expression pattern is suggestive of smooth muscle. The expression in these tissues is strongest at E15.5 and E16.5 and decreases to almost background levels by P1.5. Adult expression is observed in a small number of tissues examined, including brain, submandibular gland, bladder, colon, small intestine, liver, spleen, and placenta. The signal in positive tissues is very weak in all but the mucosal epithelium of the bladder which has the strongest expression. There is no expression observed in the following tested tissues: spinal cord, eye and harderian gland, white fat, brown fat, stomach, heart, kidney, adrenal gland, thymus, lymph node, lung, pancreas, skeletal muscle, and testes.

Uses of A259 Nucleic acids, Polypeptides, and Modulators Thereof

[0469] As human A259 was originally found in a LPS stimulated human primary osteoblast library, A259 nucleic acids, proteins, and modulators thereof can be used to modulate the proliferation, differentiation, and/or function of cells that form bone matrix, e.g., osteoblasts and osteoclasts, and can be used to modulate the formation of bone matrix. Thus A259 nucleic acids, proteins, and modulators thereof can be used to treat cartilage and bone associated diseases and disorders, and can play a role in bone growth, formation, and remodeling. Examples of cartilage and bone associated diseases and disorders include e.g., bone cancer, achondroplasia, myeloma, fibrous dysplasia, scoliosis, osteoarthritis, osteosarcoma, and osteoporosis.

[0470] As murine A259 was originally found in a bone marrow library, A259 nucleic acids, proteins, and modulators thereof can be used to modulate the proliferation, differentiation, and/or function of cells that appear in the bone marrow, e.g., stem cells (e.g., hematopoietic stem cells), and blood cells, e.g., erythrocytes, platelets, and leukocytes. Thus A259 nucleic acids, proteins, and modulators thereof can be used to treat bone marrow, blood, and hematopoietic associated diseases and disorders, e.g., acute myeloid leukemia, hemophilia, leukemia, anemia (e.g., sickle cell anemia), and thalassemia.

[0471] As integrin family members play a role in immune response, A259 nucleic acids, proteins, and modulators thereof can be used to treat immune related disorders, e.g., immunodeficiency disorders (e.g., HIV), viral disorders (e.g., infection by HSV), cell growth disorders, e.g., cancers (e.g., carcinoma, lymphoma, e.g., follicular lymphoma), autoimmune disorders (e.g., arthritis, graft rejection (e.g., allograft rejection), T cell autoimmune disorders (e.g., AIDS)), and inflammatory disorders (e.g., bacterial or viral infection, psoriasis, septicemia, cerebral malaria, inflammatory bowel disease, arthritis (e.g., rheumatoid arthritis, osteoarthritis), allergic inflammatory disorders (e.g., asthma, psoriasis)).

[0472] As integrin family members play a role in cell growth, survival, proliferation, and migration, A259 nucleic acids, proteins, and modulators thereof can be used to treat apoptotic disorders (e.g., rheumatoid arthritis, systemic lupus erythematosus, insulin-dependent diabetes mellitus) proliferative disorders (e.g., cancers, e.g., B cell cancers stimulated by TNF), and disorders abnormal vascularization (e.g., cancer). In addition, A259 nucleic acids, proteins, and modulators thereof can also be used to promote vascularization (angiogenesis).

[0473] As integrins are cell adhesion molecules, A259 nucleic acids, proteins, and modulators thereof can be used to modulate disorders associated with adhesion and migration of cells, e.g., platelet aggregation disorders (e.g., Glanzmann's thromboasthemia, which is a bleeding disorders characterized by failure of platelet aggregation in response to cell stimuli), inflammatory disorders (e.g., leukocyte adhesion deficiency, which is a disorder associated with impaired migration of neutrophils to sites of extravascular inflammation), disorders associated with abnormal tissue migration during embryo development, and tumor metastasis.

[0474] A259 polypeptides, nucleic acids, and modulators thereof, can also be used to modulate the function, morphology, proliferation and/or differentiation of cells in the tissues in which it is expressed. Such molecules can be used to treat disorders associated with abnormal or aberrant metabolism or function of cells in the tissues in which it is expressed. Tissues in which A259 is expressed, and disorders of which A259 polypeptides, nucleic acids, and modulators thereof can be used to treat, include: bone (see disorders described herein); intestine (e.g., ischemic bowel disease, infective enterocolitis, Crohn's disease); brain (e.g., cerebral edema, hydrocephalus, brain herniations, iatrogenic disease (due to, e.g., infection, toxins, or drugs)); bladder (e.g., cystitis (bladder infection), incontinence); liver (e.g., jaundice, hepatic failure, hepatic circulatory disorders (e.g., hepatic vein thrombosis and portal vein obstruction and thrombosis), hepatitis (e.g., chronic active hepatitis, acute viral hepatitis, and toxic and drug-induced hepatitis), cirrhosis (e.g., alcoholic cirrhosis, biliary cirrhosis, and hemochromatosis)); spleen (e.g., amyloidosis, Niemann-Pick disease, splenomegaly); placenta (e.g., toxemia of pregnancy (e.g., preeclampsia and eclampsia, placentitis, spontaneous abortion); and neuronal tissue (e.g., epilepsy, muscular dystrophy, and neurodegenerative diseases such as Alzheimer's disease, Parkinson's disease, and Huntington's disease).

[0475] A259 is expressed at a higher level in the liver of patients suffering from liver fibrosis than in patients not suffering from liver fibrosis. Liver fibrosis, is caused by chronic injury to the liver arising from, e.g, alcohol abuse, drugs, viral infections (e.g., hepatitis B or hepatitis C), metabolic disorders (excessive iron or copper), autoimmune attack on hepatocytes or the bile duct, and congenital disorders. Liver fibrosis is a reversible condition and injury can be present for months or years before significant scar tissue accumulates. However, liver fibrosis leads to cirrhosis, which is generally not reversible.

[0476] The liver has four major components: epithelial cells (hepatocytes), endothelial cells; tissue macrophages (Kupffer cells), and a stellate cells (a type of perivascular mesenchymal cell). In normal liver the space between the epithelium and sinusoidal endothelium is filled with a type of extracellular matrix (ECM) that is somewhat similar to a basement membrane. In fibrosis the ECM undergoes a number of changes. The total content of collagens and other components increases several fold. In addition, there is an increase in fibril-forming collagens. Stellate cells are the primary fibrogenic cell of the liver. In response to injury, quiescent stellate cells are activated and become proliferative, fibrogenic, contractile myofibroblasts. Among the key mediators of these changes are: TGF-β1, MCP-1, PDGF, ET-1, and MMP-2. Kupffer cells, endothelial cells and hepatocytes produce factors which stimulate stellate cell activation. As noted above, human A259 is expressed at a high level in activated stellate cells. This result and the increased expression of A259 in clinical liver fibrosis samples, suggest that A259 plays a role in liver fibrosis. Thus, A259 nucleic acids, polypeptides, and modulators thereof can be used to diagnose and treat liver fibrosis as well as other types of fibrosis, e.g., kidney fibrosis or lung fibrosis. Thus, liver fibrosis can be treated using antibodies directed against A259, particularly the extracellular domain of A259, the I domain of A259, or a repeat domain of A259. Also useful are polypetides which include one or more repeat domains of A259 and/or the I domain of A259.

[0477] Tables IV, V and VI below provide summaries of human A259 and murine A259 sequence information.

TABLE IV
Summary of Sequence Information of Human A259 and Murine A259.

| | | | | ATCC |
|---|---|---|---|---|
| | | Open Reading | | Accession |
| Gene | cDNA | Frame | Polypeptide | No. |
| Human A259 | SEQ ID | SEQ ID NO: 146 | SEQ ID | 207190 |
| | NO: 145 | | NO: 147 | |
| Murine A259 | SEQ ID | SEQ ID NO: 164 | SEQ ID | 207191 |
| | NO: 163 | | NO: 165 | |

TABLE V
Summary of Domains of Human A259 and Murine A259.

| | | | Extra- | Trans- | |
|---|---|---|---|---|---|
| | Signal | Mature | cellular | membrane | Cytoplasmic |
| Protein | Sequence | Protein | Domain | Domain | Domain |
| Human | aa 1-22 | aa 23-1188 | aa 1-1141 | aa 1142-1164 | aa 1165-1188 |
| A259 | SEQ ID | SEQ ID | SEQ ID | SEQ ID | SEQ ID |
| | NO: 149 | NO: 148 | NO: 150 | NO: 159 | NO: 160 |
| Murine | aa 1-22 | aa 23-1188 | aa 1-1141 | aa 1142-1164 | aa 1165-1188 |
| A259 | SEQ ID | SEQ ID | SEQ ID | SEQ ID | SEQ ID |
| | NO: 167 | NO: 166 | NO: 168 | NO: 177 | NO: 178 |

TABLE VI
Summary of Domains of Human A259 and Murine A259.

| Protein | I Domain | Repeat Domain |
|---|---|---|
| Human | aa 164-345 | aa 39-74; 115-157; 367-392; 421-455; |
| A259 | SEQ ID | 478-516; 540-575; 602-640, |
| | NO: 151 | SEQ ID NO: 152-158 |
| Murine | aa 164-345 | aa 39-74; 115-157; 367-392; 421-455; |
| A259 | SEQ ID | 478-516; 540-575; 602-640, |
| | NO: 169 | SEQ ID NO: 170-176 |

### Isolated Nucleic Acid Molecules of the Present Invention

[0478] One aspect of the invention pertains to isolated nucleic acid molecules that encode a polypeptide of the invention or a biologically active portion thereof, as well as nucleic acid molecules sufficient for use as hybridization probes to identify nucleic acid molecules encoding a polypeptide of the invention and fragments of such nucleic acid molecules suitable for use as PCR primers for the amplification or mutation of nucleic acid molecules.

[0479] As described below, one aspect of the invention pertains to isolated nucleic acids comprising nucleotide sequences encoding Delta3 polypeptides, and/or equivalents of such polypeptides or nucleic acids. The “term equivalent” is understood to include nucleotide sequences encoding functionally equivalent Delta3 polypeptides or functionally equivalent peptides having an activity of a Delta3 protein such as described herein. Equivalent nucleotide sequences also include sequences that differ by one or more nucleotide substitutions, additions or deletions, such as allelic variants, and will, therefore, include, for example, sequences that differ from the nucleotide sequence of the Delta3 nucleic acid sequence shown in any of SEQ ID NOs: 1, 3, 24, 26, 27, 29, 31, 33, 35, 37, 39, 41, 43 or 45 due to the degeneracy of the genetic code.

[0480] Another aspect of the invention pertains to isolated nucleic acid molecules that encode FTHMA-070 or T85 proteins or biologically active portions thereof, as well as nucleic acid molecules sufficient for use as hybridization probes to identify FTHMA-070 or T85-encoding nucleic acids (e.g., FTHMA-070 or T85 mRNA) and fragments for use as PCR primers for the amplification or mutation of FTHMA-070 or T85 nucleic acid molecules.

[0481] Another aspect of the invention pertains to isolated nucleic acid molecules that encode Tango-77 proteins or biologically active portions thereof, as well as nucleic acid molecules sufficient for use as hybridization probes to identify Tango-77-encoding nucleic acids (e.g., Tango-77 mRNA) and fragments for use as PCR primers for the amplification or mutation of Tango-77 nucleic acid molecules.

[0482] Yet another aspect of the invention pertains to isolated nucleic acid molecules that encode SPOIL proteins or biologically active portions thereof, as well as nucleic acid fragments sufficient for use as hybridization probes to identify SPOIL-encoding nucleic acids (e.g., SPOIL mRNA) and fragments for use as PCR primers for the amplification or mutation of SPOIL nucleic acid molecules.

[0483] Another aspect of the invention pertains to isolated nucleic acid molecules that encode NEOKINE proteins or biologically active portions thereof, as well as nucleic acid fragments sufficient for use as hybridization probes to identify NEOKINE-encoding nucleic acids (e.g., NEOKINE mRNA) and fragments for use as PCR primers for the amplification or mutation of NEOKINE nucleic acid molecules.

[0484] Another aspect of the invention pertains to isolated nucleic acid molecules that encode T129 proteins or biologically active portions thereof, as well as nucleic acid molecules sufficient for use as hybridization probes to identify T129-encoding nucleic acids (e.g., T129 mRNA) and fragments for use as PCR primers for the amplification or mutation of T129 nucleic acid molecules.

[0485] As used herein, the term “nucleic acid molecule” is intended to include DNA molecules (e.g., cDNA or genomic DNA) and RNA molecules (e.g., mRNA) and analogs of the DNA or RNA generated using nucleotide analogs. The nucleic acid molecule can be single-stranded or double-stranded, but preferably is double-stranded DNA.

[0486] An “isolated” nucleic acid molecule is one which is separated from other nucleic acid molecules which are present in the natural source of the nucleic acid. Preferably, an “isolated” nucleic acid is free of sequences (preferably protein encoding sequences) which naturally flank the nucleic acid (i.e., sequences located at the 5′ and 3′ ends of the nucleic acid) in the genomic DNA of the organism from which the nucleic acid is derived. For example, in various embodiments, the isolated FTHMA-070, T85, Tango 77, SPOIL, NEOKINE, T129 or A259 nucleic acid molecule can contain less than about 5 kb, 4 kb, 3 kb, 2 kb, 1 kb, 0.5 kb or 0.1 kb of nucleotide sequences which naturally flank the nucleic acid molecule in genomic DNA of the cell from which the nucleic acid is derived. Moreover, an “isolated” nucleic acid molecule, such as a cDNA molecule, can be substantially free of other cellular material, or culture medium when produced by recombinant techniques, or substantially free of chemical precursors or other chemicals when chemically synthesized.

[0487] A nucleic acid molecule of the present invention, e.g., a nucleic acid molecule having the nucleotide sequence of SEQ ID NOs: 1, 3, 24, 26, 27, 29, 31, 33, 35, 37, 39, 41, 43, 45, 53, 55, 57, 58, 71, 73, 76, 80, 89, 101, 104, 112, 115, 118, 121, 124, 137, 139, 145, 146, 163 or 164 or the nucleotide sequence of the cDNA of a clone deposited with the ATCC® as Accession Number 98348, 98807, 98883, 98984 or 98751 or a complement thereof, can be isolated using standard molecular biology techniques and the sequence information provided herein. Using all or a portion of the nucleic acid sequences of SEQ ID NOs: 1, 3, 24, 26, 27, 29, 31, 33, 35, 37, 39, 41, 43, 45, 53, 55, 57, 58, 71, 73, 76, 80, 89, 101, 104, 112, 115, 118, 121, 124, 137, 139, 145, 146, 163 or 164, or the nucleotide sequence of the cDNA of a clone deposited with the ATCC® as Accession Number 98348, 98807, 98883, 98984 or 98751, as a hybridization probe, nucleic acid molecules of the invention can be isolated using standard hybridization and cloning techniques (e.g., as described in Sambrook et al., eds., Molecular Cloning: A Laboratory Manual, 2nd ed., Cold Spring Harbor Laboratory, Cold Spring Harbor Laboratory Press, Cold Spring Harbor, N.Y., 1989).

[0488] In another embodiment, a portion of the nucleic acid sequence of SEQ ID NO:89, for example, from nucleotides 1 to 15 or from nucleotides 447 or 495 to 746, can used as a hybridization probe. In yet another embodiment, a portion of the nucleic acid sequence of SEQ ID NO:101, for example, from nucleotides 1 to 280 or from nucleotides 390 to 1291, can be used as a hybridization probe. In yet another embodiment, a portion of the nucleic acid sequence of SEQ ID NO:106, for example, from nucleotides 1-371 or from 481-1377, can be used as a hybridization probe. In yet another embodiment, a portion of the nucleic acid sequence of SEQ ID NO:112, for example, from nucleotides 225-364, from 96-575, or from 495-838, can be used as a hybridization probe.

[0489] Moreover, a nucleic acid molecule encompassing all or a portion of SEQ ID NO:89, SEQ ID NO:101, SEQ ID NO:104, SEQ ID NO:112, the DNA insert of the plasmid deposited with ATCC as Accession Number 98883, or the DNA insert of the plasmid deposited with ATCC as Accession Number 98984, can be isolated by the polymerase chain reaction (PCR) using synthetic oligonucleotide primers designed based upon the sequence of SEQ ID NO:89, SEQ ID NO:101, SEQ ID NO:104, SEQ ID NO:112, the DNA insert of the plasmid deposited with ATCC as Accession Number 98883, or the DNA insert of the plasmid deposited with ATCC as Accession Number 98984.

[0490] Moreover, a nucleic acid molecule encompassing all or a portion of SEQ ID NO:115, SEQ ID NO:118, SEQ ID NO:121, SEQ ID NO:124, or the nucleotide sequence of the DNA insert of the plasmid deposited with ATCC as Accession Number 98751, can be isolated by the polymerase chain reaction (PCR) using synthetic oligonucleotide primers designed based upon the sequence of SEQ ID NO:115, SEQ ID NO:118, SEQ ID NO:121, SEQ ID NO:124, or the nucleotide sequence of the DNA insert of the plasmid deposited with ATCC as Accession Number 98751.

[0491] A nucleic acid molecule of the invention can be amplified using cDNA, mRNA or genomic DNA as a template and appropriate oligonucleotide primers according to standard PCR amplification techniques. The nucleic acid so amplified can be cloned into an appropriate vector and characterized by DNA sequence analysis. Furthermore, oligonucleotides corresponding to all or a portion of a nucleic acid molecule of the invention can be prepared by standard synthetic techniques, e.g., using an automated DNA synthesizer.

[0492] In another preferred embodiment, an isolated nucleic acid molecule of the invention comprises a nucleic acid molecule which is a complement of the nucleotide sequence of SEQ ID NOs: 1, 3, 24, 26, 27, 29, 31, 33, 35, 37, 39, 41, 43, 45, 53, 55, 57, 58, 71, 73, 76, 80, 137, 139, 145, 146, 163 or 164, or the nucleotide sequence of the cDNA of a clone deposited with the ATCC® as Accession Number 98348, or 98807, or a portion thereof. A nucleic acid molecule which is complementary to a given nucleotide sequence is one which is sufficiently complementary to the given nucleotide sequence that it can hybridize to the given nucleotide sequence under the conditions set forth herein, thereby forming a stable duplex.

[0493] In a preferred embodiment, an isolated nucleic acid molecule of the invention comprises the nucleotide sequence shown in SEQ ID NO:91. The sequence of SEQ ID NO:91 corresponds to murine SPOIL-I cDNA. This cDNA comprises sequences encoding the murine SPOIL-I protein (i.e., “the coding region”, from nucleotides 135-428 of SEQ ID NO:89).

[0494] In another preferred embodiment, an isolated nucleic acid molecule of the invention comprises the nucleotide sequence shown in SEQ ID NO:92. The sequence of SEQ ID NO:92 corresponds to murine SPOIL-I cDNA. This cDNA comprises sequences encoding the mature SPOIL-I protein (i.e., from nucleotides 186-428 of SEQ ID NO:89 after the signal sequence has been cleaved).

[0495] In yet another embodiment, an isolated nucleic acid molecule of the invention comprises the nucleotide sequence shown in SEQ ID NO:89. The sequence of SEQ ID NO:89 corresponds coding and noncoding regions of murine SPOIL-I cDNA. This cDNA comprises sequences encoding the murine SPOIL-I protein (i.e., “the coding region”, from nucleotides 135-428) and noncoding regions (i.e., from nucleotides 1-134 and from nucleotides 429-746).

[0496] In yet another embodiment, an isolated nucleic acid molecule of the invention comprises the nucleotide sequence shown in SEQ ID NO:112. The sequence of SEQ ID NO:112 corresponds coding and noncoding regions of murine SPOIL-II cDNA. This cDNA comprises sequences encoding the murine SPOIL-II protein (i.e., “the coding region”, from nucleotides 96-575) and noncoding regions (i.e., from nucleotides 1-95 and from nucleotides 576-838).

[0497] In another preferred embodiment, an isolated nucleic acid molecule of the invention comprises the nucleotide sequence shown in SEQ ID NO:101. The sequence of SEQ ID NO:101 corresponds to the human SPOIL-I cDNA. This cDNA comprises sequences encoding the human SPOIL-I protein (i.e., “the coding region”, from nucleotides 124 to 630), as well as 5′ untranslated sequences (nucleotides 1 to 123) and 3′ untranslated sequences (nucleotides 631 to 1291). Alternatively, the nucleic acid molecule can comprise only the coding region of SEQ ID NO:101 (e.g., nucleotides 124 to 630).

[0498] In another preferred embodiment, an isolated nucleic acid molecule of the invention comprises the nucleotide sequence shown in SEQ ID NO:104. The sequence of SEQ ID NO:104 corresponds to the human SPOIL-II cDNA. This cDNA comprises sequences encoding the human SPOIL-II protein (i.e., “the coding region”, from nucleotides 98-721, as well as 5′ untranslated sequences (nucleotides 1-97 and 3′ untranslated sequences (nucleotides 722-1377). Alternatively, the nucleic acid molecule can comprise only the coding region of SEQ ID NO:104 (e.g., nucleotides 98-721).

[0499] In another preferred embodiment, an isolated nucleic acid molecule of the invention comprises a nucleic acid molecule which is a complement of the nucleotide sequence shown in SEQ ID NO:89, SEQ ID NO:101, SEQ ID NO:104, SEQ ID NO:112, the DNA insert of the plasmid deposited with ATCC as Accession Number 98883, or the DNA insert of the plasmid deposited with ATCC as Accession Number 98984, or a portion of any of these nucleotide sequences. A nucleic acid molecule which is complementary to the nucleotide sequence shown in SEQ ID NO:89, SEQ ID NO:101, SEQ ID NO:104, SEQ ID NO:112, the DNA insert of the plasmid deposited with ATCC as Accession Number 98883, or the DNA insert of the plasmid deposited with ATCC as Accession Number 98984, is one which is sufficiently complementary to the nucleotide sequence shown in SEQ ID NO:89, SEQ ID NO:101, SEQ ID NO:104, SEQ ID NO:112, the DNA insert of the plasmid deposited with ATCC as Accession Number 98883, or the DNA insert of the plasmid deposited with ATCC as Accession Number 98984, such that it can hybridize to the nucleotide sequence shown in SEQ ID NO:89, SEQ ID NO:101, SEQ ID NO:104, SEQ ID NO:112, the DNA insert of the plasmid deposited with ATCC as Accession Number 98883, or the DNA insert of the plasmid deposited with ATCC as Accession Number 98984, or a complement thereof, thereby forming a stable duplex.

[0500] In still another preferred embodiment, an isolated nucleic acid molecule of the present invention comprises a nucleotide sequence which is at least about 50-55%, 60-65%, preferably at least about 70-75%, more preferable at least about 80-85%, and even more preferably at least about 90-95% or more identical to the nucleotide sequences shown in SEQ ID NO:89, the nucleotide sequence shown in SEQ ID NO:101, the nucleotide sequence shown in SEQ ID NO:104, the nucleotide sequence shown in SEQ ID NO:112, the nucleotide sequence of the DNA insert of the plasmid deposited with ATCC as Accession Number 98883, the DNA insert of the plasmid deposited with ATCC as Accession Number 98984, or a portion of any of these nucleotide sequences.

[0501] In a preferred embodiment, an isolated nucleic acid molecule of the invention comprises the nucleotide sequence shown in SEQ ID NO:115. The sequence of SEQ ID NO:115 corresponds to the human NEOKINE-1 cDNA. This cDNA comprises sequences encoding the human NEOKINE-1 protein (i.e., “the coding region”, from nucleotides 97-393), as well as 5′ untranslated sequences (nucleotides 1-97) and 3′ untranslated sequences (nucleotides 394-1564). Alternatively, the nucleic acid molecule can comprise only the coding region of SEQ ID NO:115 (e.g., nucleotides 97-393, corresponding to SEQ ID NO:117).

[0502] In another preferred embodiment, an isolated nucleic acid molecule of the invention comprises the nucleotide sequence shown in SEQ ID NO:118. The sequence of SEQ ID NO:118 corresponds to a murine NEOKINE-1 cDNA. This cDNA comprises sequences encoding the murine NEOKINE-1 protein (i.e., “the coding region”, from nucleotides 212-508), as well as 5′ untranslated sequences (nucleotides 1-211) and 3′ untranslated sequences (nucleotides 509-1656). Alternatively, the nucleic acid molecule can comprise only the coding region of SEQ ID NO:118 (e.g., nucleotides 212-508, corresponding to SEQ ID NO:120).

[0503] In another preferred embodiment, an isolated nucleic acid molecule of the invention comprises the nucleotide sequence shown in SEQ ID NO:121. The sequence of SEQ ID NO:121 corresponds to a rat NEOKINE-1 cDNA. This cDNA comprises sequences encoding at least 79 amino acid residues of the rat NEOKINE-1 protein (i.e., “the coding region”, from nucleotides 1-234), as well as 3′ untranslated sequences (nucleotides 235-1372). Alternatively, the nucleic acid molecule can comprise only the coding region of SEQ ID NO:121 (e.g., nucleotides 235-1372, corresponding to SEQ ID NO:123).

[0504] In another preferred embodiment, an isolated nucleic acid molecule of the invention comprises the nucleotide sequence shown in SEQ ID NO:124. The sequence of SEQ ID NO:124 corresponds to a macaque NEOKINE-1 cDNA. This cDNA comprises sequences encoding at least 94 amino acid residues of the macaque NEOKINE-1 protein (i.e., “the coding region”, from nucleotides 3-284), as well as 3′ untranslated sequences (nucleotides 285-1458). Alternatively, the nucleic acid molecule can comprise only the coding region of SEQ ID NO:124 (e.g., nucleotides 285-1458, corresponding to SEQ ID NO:136).

[0505] In another preferred embodiment, an isolated nucleic acid molecule of the invention comprises a nucleic acid molecule which is a complement of the nucleotide sequence shown in SEQ ID NO:115, SEQ ID NO:118, SEQ ID NO:121, SEQ ID NO:124, or the nucleotide sequence of the DNA insert of the plasmid deposited with ATCC as Accession Number 98751, or a portion of any of these nucleotide sequences. A nucleic acid molecule which is complementary to the nucleotide sequence shown in SEQ ID NO:115, SEQ ID NO:118, SEQ ID NO:121, SEQ ID NO:124, or the nucleotide sequence of the DNA insert of the plasmid deposited with ATCC as Accession Number 98751, is one which is sufficiently complementary to the nucleotide sequence shown in SEQ ID NO:115, SEQ ID NO:118, SEQ ID NO:121, SEQ ID NO:124, or the nucleotide sequence of the DNA insert of the plasmid deposited with ATCC as Accession Number 98751, such that it can hybridize to the nucleotide sequence shown in SEQ ID NO:115, SEQ ID NO:118, SEQ ID NO:121, SEQ ID NO:124, or the nucleotide sequence of the DNA insert of the plasmid deposited with ATCC as Accession Number 98751, thereby forming a stable duplex.

[0506] In still another preferred embodiment, an isolated nucleic acid molecule of the present invention comprises a nucleotide sequence which is at least about 60-65%, preferably at least about 70-75%, more preferable at least about 80-85%, and even more preferably at least about 90-95%, 96-97%, 98-99% or more homologous to the nucleotide sequences shown in SEQ ID NO:115, SEQ ID NO:118, SEQ ID NO:121, SEQ ID NO:124, or the nucleotide sequence of the DNA insert of the plasmid deposited with ATCC as Accession Number 98751, or a portion of any of these nucleotide sequences.

[0507] Moreover, a nucleic acid molecule of the invention can comprise only a portion of a nucleic acid sequence encoding a full-length polypeptide of the invention for example, a fragment which can be used as a probe or primer or a fragment encoding a biologically active portion of a polypeptide of the invention. The nucleotide sequence determined from the cloning one gene allows for the generation of probes and primers designed for use in identifying and/or cloning homologs in other cell types, e.g., from other tissues, as well as homologs from other mammals. The probe/primer typically comprises substantially purified oligonucleotide.

[0508] The oligonucleotide typically comprises a region of nucleotide sequence that hybridizes under stringent conditions to at least about 12, preferably about 25, more preferably about 50, 75, 100, 125, 150, 175, 200, 250, 300, 350 or 400 consecutive nucleotides of the sense or anti-sense sequence of SEQ ID NOs: 1, 3, 24, 26, 27, 29, 31, 33, 35, 37, 39, 41, 43 or 45, or the nucleotide sequence of the cDNA of a clone deposited with the ATCC® as Accession Number 98348, or of a naturally-occurring mutant of SEQ ID NOs: 1, 3, 24, 26, 27, 29, 31, 33, 35, 37, 39, 41, 43 or 45, or the nucleotide sequence of the cDNA of a clone deposited with the ATCC® as Accession Number 98348.

[0509] The oligonucleotide typically comprises a region of nucleotide sequence that hybridizes under stringent conditions to at least about 12, preferably about 25, more preferably about 50, 75, 100, 125, 150, 175, 200, 250, 300, 350 or 400 consecutive nucleotides of the sense or anti-sense sequence of SEQ ID NO:53, SEQ ID NO:55, SEQ ID NO:57, SEQ ID NO:58, or of a naturally occurring mutant of SEQ ID NO:53, SEQ ID NO:55, SEQ ID NO:57, SEQ ID NO:58.

[0510] The oligonucleotide typically comprises a region of nucleotide sequence that hybridizes under stringent conditions to at least about 12, preferably about 25, more preferably about 50, 75, 100, 125, 150, 175, 200, 250, 300, 350 or 400 consecutive nucleotides of the sense or anti-sense sequence of SEQ ID NO:71, SEQ ID NO:73, SEQ ID NO:76, SEQ ID NO:80, or the cDNA of ATCC 98807. Alternatively, the oligonucleotide can typically comprise a region of nucleotide sequence that hybridizes under stringent conditions to at least about 12, preferably about 25, more preferably about 50, 75, 100, 125, 150, 175, 200, 250, 300, 350 or 400 consecutive nucleotides of the sense or anti-sense sequence of a naturally occurring mutant of SEQ ID NO:71, SEQ ID NO:73, SEQ ID NO:76, SEQ ID NO:80, or the cDNA of ATCC 98807.

[0511] The oligonucleotide typically comprises a region of nucleotide sequence that hybridizes under stringent conditions to at least about 12, preferably about 25, more preferably about 40, 50 or 75 consecutive nucleotides of a sense sequence of SEQ ID NO:89, SEQ ID NO:101, SEQ ID NO:104, SEQ ID NO:112, the DNA insert of the plasmid deposited with ATCC as Accession Number 98883, or the DNA insert of the plasmid deposited with ATCC as Accession Number 98984, of an anti-sense sequence of SEQ ID NO:89, SEQ ID NO:101, SEQ ID NO:104, SEQ ID NO:112, the DNA insert of the plasmid deposited with ATCC as Accession Number 98883, or the DNA insert of the plasmid deposited with ATCC as Accession Number 98984, or of a naturally occurring mutant of either SEQ ID NO:89, SEQ ID NO:101, SEQ ID NO:104, SEQ ID NO:112, the DNA insert of the plasmid deposited with ATCC as Accession Number 98883, or the DNA insert of the plasmid deposited with ATCC as Accession Number 98984.

[0512] The oligonucleotide typically comprises a region of nucleotide sequence that hybridizes under stringent conditions to at least about 12, preferably about 25, more preferably about 40, 50 or 75 consecutive nucleotides of a sense sequence of SEQ ID NO:115, SEQ ID NO:118, SEQ ID NO:121, SEQ ID NO:124, or the nucleotide sequence of the DNA insert of the plasmid deposited with ATCC as Accession Number 98751, of an anti-sense sequence of SEQ ID NO:115, SEQ ID NO:118, SEQ ID NO:121, SEQ ID NO:124, or the nucleotide sequence of the DNA insert of the plasmid deposited with ATCC as Accession Number 98751, or of a naturally occurring mutant of SEQ ID NO:115, SEQ ID NO:118, SEQ ID NO:121, SEQ ID NO:124, or the nucleotide sequence of the DNA insert of the plasmid deposited with ATCC as Accession Number 98751. In an exemplary embodiment, a nucleic acid molecule of the present invention comprises a nucleotide sequence which is greater that 500 nucleotides in length and hybridizes under stringent hybridization conditions to a nucleic acid molecule of SEQ ID NO:115, SEQ ID NO:118, SEQ ID NO:121, SEQ ID NO:124, or the nucleotide sequence of the DNA insert of the plasmid deposited with ATCC as Accession Number 98751.

[0513] The oligonucleotide typically comprises a region of nucleotide sequence that hybridizes under stringent conditions to at least about 12, preferably about 25, more preferably about 50, 75, 100, 125, 150, 175, 200, 250, 300, 350 or 400 consecutive nucleotides of the sense or anti-sense sequence of SEQ ID NO:137 or SEQ ID NO:139, or of a naturally occurring mutant of SEQ ID NO:137 or SEQ ID NO:139.

[0514] The oligonucleotide typically comprises a region of nucleotide sequence that hybridizes under stringent conditions to at least about 12, preferably about 25, more preferably about 50, 75, 100, 125, 150, 175, 200, 250, 300, 350 or 400 consecutive nucleotides of the sense or anti-sense sequence of SEQ ID NO:145, 146, 163, or 164 or of a naturally occurring mutant of SEQ ID NO: 145, 146, 163, or 164.

[0515] Probes based on the sequence of a nucleic acid molecule of the invention can be used to detect transcripts or genomic sequences encoding the same protein molecule encoded by a selected nucleic acid molecule. The probe comprises a label group attached thereto, e.g., a radioisotope, a fluorescent compound, an enzyme, or an enzyme co-factor. Such probes can be used as part of a diagnostic test kit for identifying cells or tissues which mis-express the protein, such as by measuring levels of a nucleic acid molecule encoding the protein in a sample of cells from a subject, e.g., detecting mRNA levels or determining whether a gene encoding the protein has been mutated or deleted.

[0516] A nucleic acid fragment encoding a biologically active portion of a polypeptide of the invention can be prepared by isolating a portion of any of SEQ ID NOs: 2, 25, 28, 30, 32, 34, 36, 38, 40, 42, 44 or 46, or the amino acid sequence encoded by the cDNA of a clone deposited with the ATCC® as Accession Number 98348 expressing the encoded portion of the polypeptide protein (e.g., by recombinant expression in vitro) and assessing the activity of the encoded portion of the polypeptide.

[0517] A nucleic acid fragment encoding a “biologically active portion of FTHMA-070, Tango85, Tango77, SPOIL, NEOKINE, Tango129 or A259” can be prepared by isolating a portion of SEQ ID NO:53, 55, 57, 58, 71, 73, 76, 80, 89, 101, 104, 112, 115, 118, 121, 124, 137, 139, 146 or 164, or the nucleotide sequence of the cDNA of ATCC 98807, 98883, 98984 or 98751, which encodes a polypeptide having a FTHMA-070, Tango85, Tango77, SPOIL, NEOKINE, Tango129 or A259 biological activity, expressing the encoded portion of FTHMA-070, Tango85, Tango77, SPOIL, NEOKINE, Tango129 or A259 protein (e.g., by recombinant expression in vitro) and assessing the activity of the encoded portion of FTHMA-070, Tango85, Tango77, SPOIL, NEOKINE, Tango129 or A259.

[0518] The invention further encompasses nucleic acid molecules that differ from the nucleotide sequence of SEQ ID NOs: 1, 3, 24, 26, 27, 29, 31, 33, 35, 37, 39, 41, 43, 45, 53, 55, 57, 58, 71, 73, 76, 80, 89, 101, 104, 112, 115, 118, 121, 124, 137, 139, 145, 146, 163 or 164, or the nucleotide sequence of the cDNA of a clone deposited with the ATCC® as Accession Number 98348, 98807, 98883, 98984 or 98751, due to degeneracy of the genetic code and thus encode the same protein as that encoded by the nucleotide sequence of SEQ ID NOs: 1, 3, 24, 26, 27, 29, 31, 33, 35, 37, 39, 41, 43, 45, 53, 55, 57, 58, 71, 73, 76, 80, 89, 101, 104, 112, 115, 118, 121, 124, 137, 139, 145, 146, 163 or 164, or the nucleotide sequence of the cDNA of a clone deposited with the ATCC® as Accession Number 98348, 98807, 98883, 98984 or 98751.

[0519] In addition to the nucleotide sequences of SEQ ID NOs: 1, 3, 24, 26, 27, 29, 31, 33, 35, 37, 39, 41, 43, 45, 53, 55, 57, 58, 71, 73, 76, 80, 89, 101, 104, 112, 115, 118, 121, 124, 137, 139, 145, 146, 163 or 164, or the nucleotide sequence of the cDNA of a clone deposited with the ATCC® as Accession Number 98348, 98807, 98883, 98984 or 98751, it will be appreciated by those skilled in the art that DNA sequence polymorphisms that lead to changes in the amino acid sequence may exist within a population (e.g., the human population). Such genetic polymorphisms may exist among individuals within a population due to natural allelic variation.

[0520] Such allelic variants of a polymorphic region of a Delta3 gene are also included as part of the present invention. For example, the human gene for Delta3 was mapped to chromosome 15, between markers D15S1244 and D15S144, and therefore, human Delta3 family members can include nucleotide sequence polymorphisms (e.g., nucleotide sequences that vary from SEQ ID NO: 1, 3, 24, 26, 27, 29, 31, 33, 35, or 37) that map to this chromosome 15 region (i.e., between framework regions D15S1244 and D15S144), as well as polypeptides encoded therefrom.

[0521] An allele is one of a group of genes which occur alternatively at a given genetic locus. As used herein, the terms “gene” and “recombinant gene” refer to nucleic acid molecules comprising an open reading frame encoding a Delta3, FTHMA-070, Tango85, Tango77, SPOIL, NEOKINE, Tango129 or A259 protein, preferably a mammalian Delta3, FTHMA-070, Tango85, Tango77, SPOIL, NEOKINE, Tango129 or A259 protein. Such natural allelic variations can typically result in 1-5% variance in the nucleotide sequence of a given gene. Alternative alleles can be identified by sequencing the gene of interest in a number of different individuals. This can be readily carried out by using hybridization probes to identify the same genetic locus in a variety of individuals. Any and all such nucleotide variations and resulting amino acid polymorphisms or variations that are the result of natural allelic variation and that do not alter the functional activity are intended to be within the scope of the invention.

[0522] In addition to naturally-occurring allelic variants of a nucleic acid molecule of the invention sequence that may exist in the population, the skilled artisan will further appreciate that changes can be introduced by mutation thereby leading to changes in the amino acid sequence of the encoded protein, without altering the biological activity of the protein. For example, one can make nucleotide substitutions leading to amino acid substitutions at “non-essential” amino acid residues. A “non-essential” amino acid residue is a residue that can be altered from the wild-type sequence without altering the biological activity, whereas an “essential” amino acid residue is required for biological activity. For example, amino acid residues that are not conserved or only semi-conserved among homologs of various species may be non-essential for activity and thus would be likely targets for alteration. Alternatively, amino acid residues that are conserved among the orthologs of various species (e.g., murine and human) may be essential for activity and thus would not be likely targets for alteration.

[0523] In one embodiment of a nucleotide sequence of human Delta3, the nucleotide at position 786 is an cytosine (C) (SEQ ID NO: 1). In this embodiment, the amino acid at position 150 is a alanine (A) (SEQ ID NO: 2). In an alternative embodiment, a species variant of human Delta3 has a nucleotide at position 786 which is a thymidine (T) (SEQ ID NO: 33). In this embodiment, the amino acid at position 150 is valine (V) (SEQ ID NO: 34), i.e., a conservative substitution.

[0524] In one embodiment of a nucleotide sequence of human Delta3, the nucleotide at position 594 is a cytosine (C) (SEQ ID NO: 1). In this embodiment, the amino acid at position 86 is threonine (T) (SEQ ID NO: 2). In an alternative embodiment, a species variant of human Delta3 has a nucleotide at position 594 which is a guanine (G) (SEQ ID NO: 35). In this embodiment, the amino acid at position 86 is serine (S) (SEQ ID NO: 36), i.e., a conservative substitution.

[0525] In one embodiment of a nucleotide sequence of human Delta3, wherein the nucleotide at position 883 is a thymidine (T) (SEQ ID NO: 1). In this embodiment, the amino acid at position 182 is aspartate (D) (SEQ ID NO: 2). In an alternative embodiment, a species variant of human Delta3 has a nucleotide at position 883 which is an adenine (A) (SEQ ID NO: 37). In this embodiment, the amino acid at position 182 is glutamate (E) (SEQ ID NO: 38), i.e., a conservative substitution.

[0526] In one embodiment of a nucleotide sequence of mouse Delta3, the nucleotide at position 49 is cytosine (C) (SEQ ID NO: 24). In this embodiment, the amino acid at position 4 is alanine (A) (SEQ ID NO: 25). In an alternative embodiment, a species variant of mouse Delta3 has a nucleotide at position 49 which is thymidine (T) (SEQ ID NO: 39). In this embodiment, the amino acid at position 4 is valine (V) (SEQ ID NO: 40), i.e., a conservative substitution.

[0527] In one embodiment of a nucleotide sequence of mouse Delta3, the nucleotide at position 51 is thymidine (T) (SEQ ID NO: 24). In this embodiment, the amino acid at position 5 is serine (S) (SEQ ID NO: 25). In an alternative embodiment, a species variant of mouse Delta3 has a nucleotide at position 51 which is a adenine (A) (SEQ ID NO: 41). In this embodiment, the amino acid at position 5 is threonine (T) (SEQ ID NO: 42), i.e., a conservative substitution.

[0528] In one embodiment of a nucleotide sequence of mouse Delta3, the nucleotide at position 109 is guanine (G) (SEQ ID NO: 24). In this embodiment, the amino acid at position 24 is arginine (R) (SEQ ID NO: 25). In an alternative embodiment, a species variant of mouse Delta3 has a nucleotide at position 109 which is adenine (A) (SEQ ID NO: 43). In this embodiment, the amino acid at position 24 is histidine (H) (SEQ ID NO: 44), i.e., a conservative substitution.

[0529] In one embodiment of a nucleotide sequence of mouse Delta3, wherein the nucleotide at position 130 is a thymidine (T) (SEQ ID NO: 24). In this embodiment, the amino acid at position 31 is phenylalanine (F) (SEQ ID NO: 25). In an alternative embodiment, a species variant of mouse Delta3 has a nucleotide at position 130 which is adenine (A) (SEQ ID NO: 45). In this embodiment, the amino acid at position 31 is tyrosine (Y) (SEQ ID NO: 46), i.e., a conservative substitution.

[0530] The invention also pertains to nucleic acid molecules encoding a polypeptide of the invention that contain changes in amino acid residues that are not essential for activity. Such polypeptides differ in amino acid sequence fromSEQ ID NOs: 2, 25, 28, 30, 32, 34, 36, 38, 40, 42, 44 or 46, or the amino acid sequence encoded by the cDNA of a clone deposited with the ATCC® as Accession Number 98348 yet retain biological activity. In one embodiment, the isolated nucleic acid molecule includes a nucleotide sequence encoding a protein that includes an amino acid sequence that is at least 65%, 75%, 85%, 95%, or 98% identical to the amino acid sequence of SEQ ID NOs: 2, 25, 28, 30, 32, 34, 36, 38, 40, 42, 44 or 46, or the amino acid sequence encoded by the cDNA of a clone deposited with the ATCC® as Accession Number 98348.

[0531] Moreover, nucleic acid molecules encoding proteins of the invention from other species (homologs), which have a nucleotide sequence which differs from that of the human protein described herein are intended to be within the scope of the invention. Nucleic acid molecules corresponding to natural allelic variants and homologs of a cDNA of the invention can be isolated based on their identity to the human nucleic acid molecule disclosed herein using the human cDNAs, or a portion thereof, as a hybridization probe according to standard hybridization techniques under stringent hybridization conditions. For example, a cDNA encoding a soluble form of a membrane-bound protein of the invention isolated based on its hybridization to a nucleic acid molecule encoding all or part of the membrane-bound form. Likewise, a cDNA encoding a membrane-bound form can be isolated based on its hybridization to a nucleic acid molecule encoding all or part of the soluble form.

[0532] As used herein, the term “hybridizes under stringent conditions” is intended to describe conditions for hybridization and washing under which nucleotide sequences at least 60% (65%, 70%, preferably 75%) identical to each other typically remain hybridized to each other. Such stringent conditions are known to those skilled in the art and can be found in Current Protocols in Molecular Biology, John Wiley & Sons, N.Y. (1989), 6.3.1-6.3.6. A preferred, non-limiting example of stringent hybridization conditions are hybridization in 6× sodium chloride/sodium citrate (SSC) at about 45° C., followed by one or more washes in 0.2×SSC, 0.1% SDS at 50-65° C. Preferably, an isolated nucleic acid molecule of the invention that hybridizes under stringent conditions to the sequence of SEQ ID NOs: 1, 3, 24, 26, 27, 29, 31, 33, 35, 37, 39, 41, 43, 45, 53, 55, 57, 58, 71, 73, 76, 80, 89, 101, 104, 112, 115, 118, 121, 124, 137, 139, 145, 146, 163 or 164, or the cDNA of ATCC® as Accession Number 98348, 98807, 98883, 98984 or 98751 corresponds to a naturally-occurring nucleic acid molecule. As used herein, a “naturally-occurring” nucleic acid molecule refers to an RNA or DNA molecule having a nucleotide sequence that occurs in nature (e.g., encodes a natural protein).

[0533] Accordingly, in another embodiment, an isolated nucleic acid molecule of the invention is at least 480 (500, 550, 600, 650, 700, 800, 900, 1000, 1100, 1200, 1300, 1400, 1500, 1600, 1700, 1800, 1900, 2000 or 2050) nucleotides in length and hybridizes under stringent conditions to the nucleic acid molecule comprising the nucleotide sequence, preferably the coding sequence, of SEQ ID NOs: 1, 3, 24, 26, 27, 29, 31, 33, 35, 37, 39, 41, 43 or 45, or the nucleotide sequence of the cDNA of a clone deposited with the ATCC® as Accession Number 98348, or complement thereof.

[0534] Accordingly, in another embodiment, an isolated nucleic acid molecule of the invention is at least 300 (325, 350, 375, 400, 425, 450, 500, 550, 600, 650, 700, 800, 900, 1000, or 1290) nucleotides in length and hybridizes under stringent conditions to the nucleic acid molecule comprising the nucleotide sequence, preferably the coding sequence, of SEQ ID NO:53, 55, 57 or 58.

[0535] Accordingly, in another embodiment, an isolated nucleic acid molecule of the invention is at least 300 (325, 350, 375, 400, 425, 450, 500, 550, 600, 650, 700, 800, or 989) nucleotides in length and hybridizes under stringent conditions to the nucleic acid molecule comprising the nucleotide sequence, preferably the coding sequence, of SEQ ID NO:71, 73, 76, 80, or the cDNA of ATCC 98807.

[0536] Accordingly, in another embodiment, an isolated nucleic acid molecule of the invention is at least 15 nucleotides in length and hybridizes under stringent conditions to the nucleic acid molecule comprising the nucleotide sequence of SEQ ID NO:89, 101, 104, 112 or the DNA insert of the plasmid deposited with ATCC as Accession Number 98883 or 98984, or a complement thereof. In other embodiments, the nucleic acid is at least 30, 50, 100, 250, 300, 400, 500, 600 or 700 nucleotides in length.

[0537] Accordingly, in another embodiment, an isolated nucleic acid molecule of the invention is at least 15 nucleotides in length and hybridizes under stringent conditions to the nucleic acid molecule comprising the nucleotide sequence of SEQ ID NO:115, 118, 121, 124, or the nucleotide sequence of the DNA insert of the plasmid deposited with ATCC as Accession Number 98751. In other embodiment, the nucleic acid is at least 30, 50, 100, 250 or 500 nucleotides in length.

[0538] Accordingly, in another embodiment, an isolated nucleic acid molecule of the invention is at least 300 (325, 350, 375, 400, 425, 450, 500, 550, 600, 650, 700, 800, 900, 1000, or 1290) nucleotides in length and hybridizes under stringent conditions to the nucleic acid molecule comprising the nucleotide sequence, preferably the coding sequence, of SEQ ID NO:137 or 139

[0539] Accordingly, in another embodiment, an isolated nucleic acid molecule of the invention is at least 400 (450, 500, 550, 600, 650, 700, 800, 900, 1000, 2000, or 3000) nucleotides in length and hybridizes under stringent conditions to the nucleic acid molecule comprising the nucleotide sequence, preferably the coding sequence, of SEQ ID NO:145 or 163, or a complement thereof.

[0540] Preferably, such nucleic acid molecules, “specifically hybridize” or “specifically detect” a nucleic acid molecule of the invention by exhibiting the ability to hybridize to at least approximately 6, 12, 20, 30, 50, 100, 150, 200, 300, 350, 400 or 425 consecutive nucleotides of a Delta3 nucleotide sequence designated in one of SEQ ID Nos:1, 3, 24, 26, 27, 29, 31, 33, 35, 37, 39, 41, 43 or 45, or the nucleotide sequence of the cDNA of a clone deposited with the ATCC® as Accession Number 98348, or a sequence complementary thereto, such that more than 5, 10 or 20 times more hybridization (utilizing hybridization conditions described above), preferably more than 50 times more hybridization, and even more preferably more than 100 times more hybridization than occurs relative to hybridization to a cellular nucleic acid (e.g., mRNA or genomic DNA) encoding a protein other than a Delta3 protein as defined herein.

[0541] Delta3 nucleic acids can encode polypeptides that are at least 55% identical to an amino acid sequence of SEQ ID NOs: 2, 25, 28, 30, 32, 34, 36, 38, 40, 42, 44 or 46, or the amino acid sequence encoded by the cDNA of a clone deposited with the ATCC® as Accession Number 98348. Nucleic acids which encode polypeptides which are at least about 72%, and even more preferably at least about 80%, 85%, 90%, 95%, or 98% similar with an amino acid sequence represented in SEQ ID NO: 2, 25, 28, 30, 32, 34, 36, 38, 40, 42, 44 or 46, or the amino acid sequence encoded by the cDNA of a clone deposited with the ATCC® as Accession Number 98348 are also within the scope of the invention.

[0542] In one embodiment, the nucleic acid of the present invention encodes a polypeptide having an overall amino acid sequence similarity of at least about 72%, at least about 80%, at least about 85%, at least about 90%, at least about 95%, at least about 98%, or at least about 99% with the amino acid sequence shown in SEQ ID NOs: 2, 25, 28, 30, 32, 34, 36, 38, 40, 42, 44 or 46. In a preferred embodiment, the nucleic acid encodes a protein comprising the amino acid set forth in SEQ ID NOs: 2, 25, 28, 30, 32, 34, 36, 38, 40, 42, 44 or 46, or the amino acid sequence encoded by the cDNA of a clone deposited with the ATCC® as Accession Number 98348. Preferably, the nucleic acid includes all or a portion of the nucleotide sequence corresponding to the coding region of SEQ ID Nos: 1, 3, 24, 26, 27, 29, 31, 33, 35, 37, 39, 41, 43 or 45, or the nucleotide sequence of the cDNA of a clone deposited with the ATCC® as Accession Number 98348.

[0543] The nucleic acids of the invention can encode a Delta3 protein from any species, including insects. Preferred nucleic acids encode vertebrate Delta3 proteins. Even more preferred nucleic acids encode mammalian Delta3 proteins including primate Delta3 proteins, e.g., human Delta3 proteins, and murine Delta3 proteins. Other nucleic acids of the invention can encode avian, equine, canine, feline, bovine or porcine Delta3 proteins.

[0544] In a preferred embodiment of the invention, the nucleic acid encodes a polypeptide comprising an extracellular domain of Delta3, e.g., human or mouse Delta3 including allelic variants havingSEQ ID NOs: 2, 25, 28, 30, 32, 34, 36, 38, 40, 42, 44 or 46, or the amino acid sequence encoded by the cDNA of a clone deposited with the ATCC® as Accession Number 98348. Accordingly, preferred nucleic acids encode a polypeptide comprising about amino acid 1 to about amino acid 529 of SEQ ID NO: 2, 28, 30, 32, 34, 36 or 38, or alternatively about amino acid 1 to about amino acid 530 of SEQ ID NO: 25, 40, 42, 44, or 46.

[0545] Other preferred nucleic acids encode a polypeptide corresponding to an extracellular domain of Delta3 lacking the signal peptide, e.g., a polypeptide comprising about amino acid 18 to about amino acid 529 of SEQ ID NO: 2 or about amino acid 18 to about amino acid 530 of SEQ ID NO: 25. Yet other preferred nucleic acids encode a polypeptide comprising at least one of the conserved motifs in the extracellular domain of Delta3, e.g., a DSL motif (for example, amino acids 173-217 of SEQ ID NO: 2 or amino acids 174-218 of SEQ ID NO: 25) or an EGF-like motif (for example, EGF-like 1, amino acids 222-250 of SEQ ID NO: 2), or also for example amino acids 223-251 of SEQ ID NO: 25. Additional EGF-like domains are from amino acids 253-281, 288-321, 328-359, 366-399, 411-437, 444-475, and 484-517 of SEQ ID NO: 2 and 254-282, 289-322, 329-360, 367-400, 412-438, 445-476, and 485-518 of SEQ ID NO: 25.

[0546] In one embodiment, the nucleic acid encodes a protein having at least one EGF-like motif. In other embodiments, the nucleic acid encodes proteins having at least 2, at least 3, at least 4, at least 5, at least 6, at least 7, or 8 EGF-like domains or amino acids 223-251, 254-282, 289-322, 329-360, 367-400, 412-438, 445-476, and 485-518 of SEQ ID NO: 25.

[0547] The polypeptide encoded by a nucleic acid encoding any of these numbers of EGF-like domains can further comprise an amino acid sequence encoding a DSL motif.

[0548] The DSL region or motif is shared by all known members of the family of presumed ligands of Notch-like proteins (Delta1 and Serrate in Drosophila; Lag-2 and Apx-1 in Caenorhabditis elegans) (Henderson et al. (1994) Development 120:2913; Tax et al. (1994) Nature 368:150; Fleming et al. (1990) Genes Dev. 4:2188; Thomas et al. (1991) Development 11:749; Mello et al. (1994) Cell 77:95). The DSL motif is located in the amino terminal portion of the protein, i.e., extracellular, which is closely related to a similar domain in the Drosophila Delta1 protein and which has been described as being necessary and sufficient for in vitro binding to Notch (Henrique et al. (1995) Nature 375:787; Muskavitch (1994) Dev. Biol. 166:415).

[0549] In one embodiment, a nucleic acid of the invention encodes a polypeptide that comprises a human or mouse Delta3 DSL domain and which is capable of binding a receptor. A Delta3 DSL domain conforms to the following DSL consensus sequence: X-X-C-X-X-X-Y-[FY]-G-X-X-C-X-X-X-C-[HR]-X-R-X-D-X-F-G-[RH]-X-X-C-C-C-C-G-C-C-C-V-C-C-G-W-C-G-X-Y-C (SEQ ID NO:23), wherein all amino acids are indicated according to their universal single letter designation, brackets indicate that the amino acid at that position is selected from one of the amino acids within the brackets, and “X” designates any amino acid, and wherein the DSL domain is at least 60%, or more preferably at least 65%, 70%, 75%, 80%, 85%, or most preferably 90%, 95%, 98% or 100% identical, i.e., no gaps in the sequence, to the human Delta3 polypeptide sequence from amino acids 173-217 of SEQ ID NO:2. In another embodiment, a Delta3 DSL domain conforms to the above-described DSL consensus sequence and is at least 60%, or more preferably at least 65%, 70%, 75%, 80%, 85%, or most preferably 90%, 95%, 98% or 100% identical to the mouse Delta3 DSL sequence from amino acids 174-218 of SEQ ID NO: 25.

[0550] In another embodiment, a nucleic acid of the invention encodes Delta3 DSL domain has a cysteine at amino acid positions 176, 185, 189, 201, 209, and 217 of SEQ ID NO: 2, and is at least 60%, or more preferably at least 65%, 70%, 75%, 80%, 85%, or most preferably 90%, 95%, 98% or 100% identical to the human Delta3 polypeptide sequence from amino acids 173-217 of SEQ ID NO:2. In another embodiment, a Delta3 DSL domain has a cysteine at amino acid positions 177, 186, 190, 202, 210, and 218 of SEQ ID NO: 25, and is at least 60%, or more preferably at least 65%, 70%, 75%, 80%, 85%, or most preferably 90%, 95%, 98% or 100% identical to the mouse Delta3 DSL sequence from amino acids 174-218 of SEQ ID NO: 25.

[0551] In one embodiment, a nucleic acid of the invention encodes a polypeptide that comprises a human or mouse Delta3 EGF-like domain. An EGF-like domain has the following consensus sequence: C-X₄₋₈-C-X₁₋₂-G-X-C-X₅₋₉-[WFY]-X-C-X-C-X₂₋₄-G-[WFY]-G-X_{1.3}-[FY]-C (SEQ ID NO:52), wherein all amino acids are indicated according to their universal single letter designation, brackets indicate that the amino acid at that position is selected from one of the amino acids within the brackets, and “X” designates any amino acid. The numbers in subscript next to an amino acid position indicate a range of possible amino acids, for example, C-X₅₋₉-C indicates that there is a cysteine followed by any 5 to 9 amino acids followed by a cysteine. In one embodiment, an EGF-like domain of the invention is at least 75%, or more preferably at least 80%, 85%, or most preferably 90%, 95%, 98% or 100% identical, i.e., no gaps in the sequence, to the human Delta3 polypeptide sequence from amino acids 222-250, amino acids 253-281, amino acids 288-321, amino acids 328-359, amino acids 366-399, amino acids 411-437, amino acids 444-475, and amino acids 484-517 of SEQ ID NO: 2. In another preferred embodiment, a Delta3 EGF-like domain conforms to the above-described EGF-like consensus sequence and is at least 60%, or more preferably at least 75%, 80%, 85%, or most preferably 90%, 95%, 98% or 100% identical to the mouse Delta3 DSL sequence from amino acids 223-251, amino acids 254-282, amino acids 289-322, amino acids 329-360, amino acids 367-400, amino acids 412-438, amino acids 445-476, and amino acids 485-518 of SEQ ID NO: 25.

[0552] In another embodiment, a nucleic acid of the invention encodes Delta3 EGF-like domain is at least 75%, or more preferably at least 80%, 85%, or most preferably 90%, 95%, 98% or 100% identical to the human Delta3 polypeptide sequence from amino acids 222-250, amino acids 253-281, amino acids 288-321, amino acids 328-359, amino acids 366-399, amino acids 411-437, amino acids 444-475, or amino acids 484-517 of SEQ ID NO: 2. In another embodiment, a Delta3 EGF-like domain is at least 75%, or more preferably at least 80%, 85%, or most preferably 90%, 95%, 98% or 100% identical to the mouse Delta3 EGF-like domain sequence from amino acids 223-251, amino acids 254-282, amino acids 289-322, amino acids 329-360, amino acids 367-400, amino acids 412-438, amino acids 445-476, or amino acids 485-518 of SEQ ID NO: 25.

[0553] Polypeptides encoded by any of the above-described nucleic acids can be soluble. Preferred soluble peptides comprise at least a portion of the extracellular domain of a Delta3 protein. Even more preferred soluble polypeptides comprise an amino acid sequence corresponding to about amino acid 1 to about amino acid 529 of SEQ ID NO: 2, corresponding to about amino acid 18 to about amino acid 529 of SEQ ID NO: 2 or a homolog thereof. Alternatively, an extracellular domain is comprised of about amino acid 1 to about amino acid 530 of SEQ ID NO: 25, about amino acid 18 to about amino acid 530 of SEQ ID NO: 25 or a homolog thereof.

[0554] Yet other preferred soluble Delta3 polypeptides comprise at least one EGF-like domain. Such polypeptides may in addition comprise a DSL domain and optionally a signal peptide.

[0555] In another embodiment, nucleic acids encode a Delta3 polypeptide as part of a fusion protein. A preferred fusion protein is a Delta3 Immunoglobulin (Ig) fusion protein, or alternatively, a Delta3 portion as described above fused to Ig. Such fusion proteins can comprise at least a portion of the extracellular domain of a Delta3 domain. A portion can be any portion of at least about 10 amino acids, such as the portions described above. Nucleic acids encoding such fusion proteins can be prepared, e.g., as described in U.S. Pat. No. 5,434,131.

[0556] Alternatively, polypeptides encoded by the nucleic acid of the invention can be membrane bound. Membrane bound polypeptides of the invention preferably comprise a transmembrane domain. As used herein, a “transmembrane domain” refers to an amino acid sequence having at least about 20 to 25 amino acid residues in length and which contains at least about 65-70% hydrophobic amino acid residues such as alanine, leucine, isoleucine, phenylalanine, proline, tyrosine, tryptophan, or valine. The transmembrane domain can be from a Delta3 protein, such as a transmembrane domain comprising amino acid 530 to amino acid 553 of SEQ ID NO: 2, or amino acid 531 to amino acid 554 of SED ID NO: 25.

[0557] In a one embodiment, a nucleic acid of the invention encodes transmembrane domain contains at least about 15 to 30 amino acid residues, preferably about 20-25 amino acid residues, and has at least about 60-80%, more preferably 65-75%, and more preferably at least about 70% hydrophobic residues from about amino acid 530 to about amino acid 553 of SEQ ID NO: 2, or from about amino acid 531 to about amino acid 554 of SED ID NO: 25.

[0558] Alternatively, the transmembrane domain can be from another membrane protein, such as to produce a chimeric membranous Delta3 protein. Yet other polypeptides of the invention can be intracellular proteins. Accordingly, also within the scope of the invention are proteins which do not comprise a transmembrane domain. Other proteins of the invention do not include an extracellular domain. Additional proteins of the invention do not include an extracellular domain nor a transmembrane domain.

[0559] Polypeptides encoded by the nucleic acid of the invention can comprise a cytoplasmic domain. In a preferred embodiment, a nucleic acid of the invention encodes a polypeptide comprising a Delta3 cytoplasmic domain. In an even more preferred embodiment, the cytoplasmic domain has an amino acid sequence corresponding to a sequence from about amino acid 554 to about amino acid 685 of SEQ ID NO: 2, or a portion thereof, or from about amino acid 555 to about amino acid 686 of SEQ ID NO: 25.

[0560] In yet other preferred embodiments, the nucleic acid of the invention encodes a polypeptide comprising at least one domain of a Delta3 protein selected from the group consisting of: a signal peptide, a DSL motif, an EGF-like domain, a transmembrane domain, and a cytoplasmic domain. The polypeptide of the invention can comprise several of these domains from a Delta3 protein.

[0561] Alternatively, a nucleic acid of the invention encodes a polypeptide that can be a chimeric protein, i.e., comprised of at least one conserved domain of SEQ ID NO: 2, 25, 2, 25, 28, 30, 32, 34, 36, 38, 40, 42, 44 or 46, or the amino acid sequence encoded by the cDNA of a clone deposited with the ATCC® as Accession Number 98348 and at least one conserved domain from a polypeptide other than a Delta3 protein. Accordingly, in one embodiment, a nucleic acid of the invention encodes a Delta3 polypeptide of 2, 25, 28, 30, 32, 34, 36, 38, 40, 42, 44 or 46, or the amino acid sequence encoded by the cDNA of a clone deposited with the ATCC® as Accession Number 98348 wherein, for example, the DSL motif from amino acids 173-217 of SEQ ID NO: 2, are replaced with amino acids from a comparable DSL domain of a Delta-like protein other than Delta3.

[0562] In yet another embodiment, the nucleic acid encodes a Delta3 protein having a signal peptide from a protein other than a Delta3 protein. Also within the scope of the invention are Delta3 nucleic acids which encode a Delta3 polypeptide, wherein the cytoplasmic domain is other than a Delta3 cytoplasmic domain. In addition, the invention contemplates a Delta3 nucleic acid molecule, wherein the nucleic acid encodes a Delta3 polypeptide with a cytoplasmic domain and a extracellular domain from a protein other than Delta3.

[0563] Delta-like proteins other than Delta3 proteins can be, e.g., toporythmic proteins. “Toporythmic proteins” is intended to include Notch, Delta, Serrate, Enhancer of Split, Deltex, and other members of this family of proteins sharing structural similarities. (See e.g., International Patent Publication Nos. WO 97/01571 (Jan. 16, 1997); WO 92/19734 (Nov. 12, 1992) and WO 94/07474 (Apr. 14, 1994)).

[0564] Nucleic acids encoding polypeptides having an amino acid sequence that is homologous to any of the above described portions of SEQ ID NO: 2, 25, 28, 30, 32, 34, 36, 38, 40, 42, 44 or 46, or the amino acid sequence encoded by the cDNA of a clone deposited with the ATCC® as Accession Number 98348 are also within the scope of the invention. Preferred nucleic acids of the invention encode polypeptides comprising an amino acid sequence which are at least about 70%, at least about 75%, at least about 80%, or at least about 85% identical to the amino acid sequence of any of the Delta3 domains. Even more preferred nucleic acids of the invention encode polypeptides comprising an amino acid sequence which are at least about 90%, at least about 95%, at least about 98%, or at least about 99% identical to the amino acid sequence of any of the Delta3 domains.

[0565] In one embodiment, the nucleic acid, e.g., cDNA, encodes a peptide having at least one activity of the subject Delta3 polypeptide, such as the ability to bind to a Delta3 interacting molecule, such as a Delta3 receptor e.g., Notch. Non-limiting examples of binding assays for Delta3 interaction with a Delta3 interacting molecule include: measuring interaction of Delta3 polypeptides of the invention with a Delta3 interacting molecule, such as for example Notch, include binding assays involving soluble forms of Delta3 and a Delta3 interacting molecule, measuring a Delta3 domain, e.g., the DSL domain, binding to a Delta3 interacting molecule, measuring Delta3 binding to receptors expressed on cells, and measuring soluble Delta3 binding to an immobilized Delta3 interacting molecule, i.e., solid-phase binding assays. Specific examples of these assays are set forth in Shimizu et al. (1999) J. Biol. Chem. 274:32961-32969.

[0566] Additional molecules, e.g., polypeptides or peptides, capable of interacting with a Delta3 protein or fragment thereof can be identified by various methods, e.g., methods based on binding assays. For example, various types of expression libraries can be screened with a Delta3 protein or portion thereof. A two-hybrid system can be used to isolate cytoplasmic proteins interacting with the cytoplasmic domain of Delta3. Portions of Delta3 proteins which are capable of interacting with a ligand can be determined by preparing fragments of Delta3 proteins and screening these fragments for those that are capable of interacting with the ligand.

[0567] Based at least in part on the observation that the N-terminal portion of Drosophila Delta protein, which contains a DSL domain and EGF-like domain, is necessary and sufficient for in vitro binding to Notch (Henrique et al. (1995) Nature 375:787; Muskavitch (1994) Dev. Biol. 166:415), it is likely that the domain of Delta3 proteins capable of interacting with a ligand includes the DSL domain and/or at least a portion of the EGF-like domain. However, other portions of the extracellular domain of Delta3 could be necessary for binding to at least some Delta3 ligands.

[0568] In other preferred embodiments, the subject Delta3 polypeptide can modulate proliferation and/or differentiation or cell death of specific target cells, e.g., neural cells or endothelial cells. Assays for determining that a Delta3 polypeptide has at least one activity of a Delta3 protein are described infra.

[0569] Still other preferred nucleic acids of the present invention encode a Delta3 polypeptide which includes a polypeptide sequence corresponding to all or a portion of amino acid residues in SEQ ID NO: 2, 25, 28, 30, 32, 34, 36, 38, 40, 42, 44 or 46, e.g., at least 2, 5, 10, 25, 50, 100, 150 or 200 amino acid residues of that region. Preferred nucleic acids encode a polypeptide comprising at least two consecutive amino acid residues from about amino acid 1 to about amino acid 570 of the amino acid sequence set forth in SEQ ID NO: 2 or from about amino acid 1 to about amino acid 571 of the amino acid sequence set forth in SEQ ID NO: 25.

[0570] Yet other preferred nucleic acids encode a polypeptide comprising at least about 3, at least about 5, at least about 10, at least about 15, at least about 20, or at least about 25 consecutive amino acids from about amino acid 1 to about amino acid 575 set forth in SEQ ID NO: 2, from about amino acid 18 to about amino acid 575 set forth in SEQ ID NO: 2, from about amino acid 1 to about amino acid 576 set forth in SEQ ID NO: 25, or from about amino acid 18 to about amino acid 576 set forth in SEQ ID NO: 25.

[0571] The invention further provides for nucleic acids encoding a polypeptide having an amino acid sequence which is at least about 70%, preferably at least about 80%, and most preferably at least about 90% to at least about 10 consecutive amino acids set forth in SEQ ID NOs: 2, 25, 28, 30, 32, 34, 36, 38, 40, 42, 44 or 46, or at least about 10 consecutive amino acids from a portion of SEQ ID NOs: 2, 25, 28, 30, 32, 34, 36, 38, 40, 42, 44 or 46. In one embodiment, the portion corresponds to about amino acid 1 to about amino acid 575 of SEQ ID NO: 2, about amino acid 18 to about amino acid 575 of SEQ ID NO: 2, from about amino acid 1 to about amino acid 576 set forth in SEQ ID NO: 25, or from about amino acid 1 to about amino acid 576 set forth in SEQ ID NO: 25. Coding nucleic acid molecules of the invention preferably comprise at least about 200, 250, 300, 350, 400, 410, 420, 430, 435 or 440 base pairs.

[0572] The invention further pertains to nucleic acid molecules for use as probes/primer or antisense molecules (i.e. non-coding nucleic acid molecules), which can comprise at least about 6, 12, 20, 30, 50, 100, 125, 150 or 200 nucleotides or base pairs. Yet other preferred nucleic acids of the invention comprise at least about 300, at least about 350, at least about 400, at least about 450, at least about 500, or at least about 600 nucleotides of SEQ ID NOs: 1, 3, 24, 26, 27, 29, 31, 33, 35, 37, 39, 41, 43 or 45. In some embodiments, the nucleic acids of the invention correspond to a 5′ portion of nucleic acid sequence SEQ ID NO: 1, 3, 24, 26, 27, 29, 31, 33, 35, 37, 39, 41, 43 or 45. For example, a nucleic acid of the invention can correspond to a portion of about nucleotide 1 to about nucleotide 2000 of nucleic acid sequence SEQ ID NO: 1, 3, 24, 26, 27, 29, 31, 33, 35, 37, 39, 41, 43 or 45.

[0573] Preferred nucleic acids for use as a probe according to the methods of the invention include nucleic acids comprising a nucleotide sequence having at least about 6, preferably at least about 9, more preferably at least about 12 and even more preferably at least about 15 consecutive nucleotides from SEQ ID NOs: Nos:1, 3, 24, 26, 27, 29, 31, 33, 35, 37, 39, 41, 43 or 45, or from a portion thereof. In a preferred embodiment, the portion corresponds to about nucleotide 1 to about nucleotide 2060 of SEQ ID NOs: Nos:1, 3, 24, 26, 27, 29, 31, 33, 35, 37, 39, 41, 43 or 45. Alternatively a portion can be a nucleotide sequence encoding a conserved motif of hDelta3 or mDelta3 protein. Alternatively, the portion can be a nucleotide sequence located between nucleic acid sequences encoding conserved motifs of a human or mouse Delta3 protein.

[0574] The invention further provides for a combination of at least two nucleic acids corresponding to at least a portion of SEQ ID NOs: Nos:1, 3, 24, 26, 27, 29, 31, 33, 35, 37, 39, 41, 43 or 45, or a homolog thereof. Accordingly, in one embodiment, the invention provides a combination of two nucleic acids of at least about 6, preferably at least about 9, more preferably at least about 12 and even more preferably at least about 15 consecutive nucleotides from SEQ ID NOs: Nos:1, 3, 24, 26, 27, 29, 31, 33, 35, 37, 39, 41, 43 or 45, or from a portion thereof. In a preferred embodiment, at least one of the nucleic acids is labeled.

[0575] Another aspect of the invention provides a nucleic acid which hybridizes under stringent conditions to a nucleic acid represented by one of SEQ ID Nos:1, 3, 24, 26, 27, 29, 31, 33, 35, 37, 39, 41, 43 or 45. In yet another embodiment, a naturally occurring Delta3 nucleic acid of the invention, e.g., SEQ ID NO: 1, 3, 24 or 26 hybridizes under high stringency conditions to a species variant of Delta3, such as a species variant shown in any one of SEQ ID NOs: 27, 29, 31, 33, 35, 37, 39, 41, 43 or 45. In yet another embodiment, a Delta3 nucleic acid, e.g., SEQ ID NO: 1, 3, 24, 26, 27, 29, 31, 33, 35, 37, 39, 41, 43 or 45 hybridizes under high stringency conditions to a representative mammalian Delta3.

[0576] Preferred nucleic acids have a sequence at least about 75% identical and more preferably at least about 80% and even more preferably at least about 85% identical with a nucleic acid sequence of a Delta3 gene, such as a human Delta3 gene or a mouse Delta3 gene, e.g., such as a sequence shown in one of SEQ ID NOs: 1, 3, 24, 26, 27, 29, 31, 33, 35, 37, 39, 41, 43 or 45. Nucleic acids at least about 90%, more preferably at least about 95%, and most preferably at least about 98-99% homologous with a nucleic sequence represented in one of SEQ ID NOs: 1, 3, 24, 26, 27, 29, 31, 33, 35, 37, 39, 41, 43 or 45 are of course also within the scope of the invention. In preferred embodiments, the nucleic acid is a human Delta3 gene and in particularly preferred embodiments, includes all or a portion of the nucleotide sequence corresponding to the coding region of one of SEQ ID NOs: 1, 3, 24, 26, 27, 29, 31, 33, 35, 37, 39, 41, 43 or 45.

[0577] In addition to naturally-occurring allelic variants of the FTHMA-070, T85, Tango77, T129 or A259 sequence that may exist in the population, the skilled artisan will further appreciate that changes can be introduced by mutation into the nucleotide sequence of SEQ ID NO:53, SEQ ID NO:55, SEQ ID NO:57, SEQ ID NO:58, SEQ ID NO:71, SEQ ID NO:73, SEQ ID NO:76, SEQ ID NO:80, 137, 139, 145, 146, 163, 164 or the cDNA of ATCC 98807, thereby leading to changes in the amino acid sequence of the encoded FTHMA-070, T85, Tango77, T129 or A259 protein, without altering the functional ability of the FTHMA-070, T85, Tango77, T129 or A259 protein. For example, one can make nucleotide substitutions leading to amino acid substitutions at “non-essential” amino acid residues. A “non-essential” amino acid residue is a residue that can be altered from the wild-type sequence of FTHMA-070, T85, Tango77, T129 or A259 (e.g., the sequence of SEQ ID NO:54, SEQ ID NO:72, SEQ ID NO:75, SEQ ID NO:77, SEQ ID NO:79, SEQ ID NO:81, SEQ ID NO:83, SEQ ID NO:138, SEQ ID NO:147 or SEQ ID NO:165) without altering the biological activity, whereas an “essential” amino acid residue is required for biological activity. For example, amino acid residues that are conserved among the FTHMA-070, T85, Tango77, T129 or A259 proteins of various species are predicted to be particularly unamenable to alteration.

[0578] For example, preferred T85 proteins of the present invention, contain at least one fibronectin III or Ig superfamily domain. Such conserved domains are less likely to be amenable to mutation. Other amino acid residues, however, (e.g., those that are not conserved or only semi-conserved among T85 of various species) may not be essential for activity and thus are likely to be amenable to alteration.

[0579] Accordingly, another aspect of the invention pertains to nucleic acid molecules encoding FTHMA-070, T85, Tango77, T129 or A259 proteins that contain changes in amino acid residues that are not essential for activity. Such FTHMA-070, T85, Tango77, T129 or A259 proteins differ in amino acid sequence from SEQ ID NO:54, SEQ ID NO:58, SEQ ID NO:72, SEQ ID NO:75, SEQ ID NO:77, SEQ ID NO:79, SEQ ID NO:81, SEQ ID NO:83, SEQ ID NO:138, SEQ ID NO:147 or SEQ ID NO:165, respectively, yet retain biological activity.

[0580] For example, preferred T129 proteins of the present invention, contain at least one TNFR/NGFR cysteine rich domain. Such conserved domains are less likely to be amenable to mutation. Other amino acid residues, however, (e.g., those that are not conserved or only semi-conserved among T129 of various species) may not be essential for activity and thus are likely to be amenable to alteration.

[0581] In one embodiment, the isolated nucleic acid molecule includes a nucleotide sequence encoding a protein that includes an amino acid sequence that is at least about 45% identical, 65%, 75%, 85%, 95%, or 98% identical to the amino acid sequence of SEQ ID NO:72, SEQ ID NO:75, SEQ ID NO:77, SEQ ID NO:79, SEQ ID NO:81, SEQ ID NO:83, SEQ ID NO:138, SEQ ID NO:147 or SEQ ID NO:165.

[0582] An isolated nucleic acid molecule encoding a FTHMA-070, T85, Tango77, T129 or A259 protein having a sequence which differs from that of SEQ ID NO:54, SEQ ID NO:58, SEQ ID NO:72, SEQ ID NO:75, SEQ ID NO:77, SEQ ID NO:79, SEQ ID NO:81, SEQ ID NO:83, SEQ ID NO:83, SEQ ID NO:138, SEQ ID NO:147 or SEQ ID NO:165, respectively, can be created by introducing one or more nucleotide substitutions, additions or deletions into the nucleotide sequence of SEQ ID NO:53, SEQ ID NO:55, SEQ ID NO:57, SEQ ID NO:58, SEQ ID NO:71, SEQ ID NO:73, SEQ ID NO:76, SEQ ID NO:80, SEQ ID NO:137, SEQ ID NO:139, SEQ ID NO:145, SEQ ID NO:146, SEQ ID NO:163 or SEQ ID NO:164 or the cDNA of ATCC 98807 such that one or more amino acid substitutions, additions or deletions are introduced into the encoded protein. Mutations can be introduced by standard techniques, such as site-directed mutagenesis and PCR-mediated mutagenesis. Preferably, conservative amino acid substitutions are made at one or more predicted non-essential amino acid residues. A “conservative amino acid substitution” is one in which the amino acid residue is replaced with an amino acid residue having a similar side chain. Families of amino acid residues having similar side chains have been defined in the art. These families include amino acids with basic side chains (e.g., lysine, arginine, histidine), acidic side chains (e.g., aspartic acid, glutamic acid), uncharged polar side chains (e.g., glycine, asparagine, glutamine, serine, threonine, tyrosine, cysteine), nonpolar side chains (e.g., alanine, valine, leucine, isoleucine, proline, phenylalanine, methionine, tryptophan), beta-branched side chains (e.g., threonine, valine, isoleucine) and aromatic side chains (e.g., tyrosine, phenylalanine, tryptophan, histidine). Thus, a predicted nonessential amino acid residue in FTHMA-070, T85, Tango77, T129 or A259 is preferably replaced with another amino acid residue from the same side chain family. Alternatively, mutations can be introduced randomly along all or part of a FTHMA-070, T85, Tango77, T129 or A259 coding sequence, such as by saturation mutagenesis, and the resultant mutants can be screened for FTHMA-070, T85, Tango77, T129 or A259 biological activity to identify mutants that retain activity. Following mutagenesis, the encoded protein can be expressed recombinantly and the activity of the protein can be determined.

[0583] In a preferred embodiment, a mutant FTHMA-070 or T85 protein can be assayed for the ability to form protein:protein interactions with other proteins.

[0584] In a preferred embodiment, a mutant Tango-77 protein can be assayed for: (1) the ability to form protein:protein interactions with proteins in the Tango-77 signalling pathway; (2) the ability to bind a Tango-77 ligand or receptor; or (3) the ability to bind to an intracellular target protein or (4) the ability to interact with a protein involved in inflammation or (5) the ability to bind the IL-1 receptor. In yet another preferred embodiment, a mutant Tango-77 can be assayed for the ability to modulate inflammation, asthma, autoimmune diseases, and sepsis.

[0585] In a preferred embodiment, a mutant A259 polypeptide that is a variant of a A259 polypeptide of the invention can be assayed for: (1) the ability to form protein:protein interactions with proteins in a signaling pathway of the polypeptide of the invention; (2) the ability to bind a ligand of the polypeptide of the invention; or (3) the ability to bind to an intracellular target protein of the polypeptide of the invention. In yet another preferred embodiment, the mutant polypeptide can be assayed for the ability to modulate cellular proliferation, cellular migration or chemotaxis, or cellular differentiation.

[0586] In addition to naturally-occurring allelic variants of the SPOIL sequences that may exist in the population, the skilled artisan will further appreciate that changes can be introduced by mutation into the nucleotide sequences of SEQ ID NO:89, SEQ ID NO:101, SEQ ID NO:104, SEQ ID NO:112, the DNA insert of the plasmid deposited with ATCC as Accession Number 98883, or the DNA insert of the plasmid deposited with ATCC as Accession Number 98984, thereby leading to changes in the amino acid sequence of the encoded SPOIL proteins, without altering the functional ability of the SPOIL proteins. For example, nucleotide substitutions leading to amino acid substitutions at “non-essential” amino acid residues can be made in the sequence of SEQ ID NO:89, SEQ ID NO:101, SEQ ID NO:104, SEQ ID NO:112, the DNA insert of the plasmid deposited with ATCC as Accession Number 98883, or the DNA insert of the plasmid deposited with ATCC as Accession Number 98984. A “non-essential” amino acid residue is a residue that can be altered from the wild-type sequence of SPOIL (e.g., the sequence of SEQ ID NO:90, SEQ ID NO:102, SEQ ID NO:105, SEQ ID NO:113, the amino acid sequence encoded by the DNA insert of the plasmid deposited with ATCC as Accession Number 98883, or the amino acid sequence encoded by the DNA insert of the plasmid deposited with ATCC as Accession Number 98984) without altering the biological activity, whereas an “essential” amino acid residue is required for biological activity. For example, amino acid residues of SPOIL that are conserved among the human and murine family numbers of this invention, (as indicated by the alignment and comparison of the amino acid sequences of SEQ ID NO:90, SEQ ID NO:102, SEQ ID NO:105, SEQ ID NO:113) are predicted to be essential in SPOIL and, thus are not likely to be amenable to alteration. Table III further sets forth conserved amino residues among SPOIL proteins which are predicted to be unamenable to alteration. Furthermore, amino acid residues that are conserved among the SPOIL proteins of the present invention, and the IL-1ra protein (as indicated by the alignment presented in FIG. 7) are predicted to be unamenable to alteration.

[0587] Accordingly, another aspect of the invention pertains to nucleic acid molecules encoding SPOIL proteins that contain changes in amino acid residues that are not essential for activity. Such SPOIL proteins differ in amino acid sequence from SEQ ID NO:90, SEQ ID NO:102, SEQ ID NO:105, SEQ ID NO:113, the amino acid sequence encoded by the DNA insert of the plasmid deposited with ATCC as Accession Number 98883, or the amino acid sequence encoded by the DNA insert of the plasmid deposited with ATCC as Accession Number 98984, yet retain biological activity.

[0588] In one embodiment, the isolated nucleic acid molecule comprises a nucleotide sequence encoding a protein, wherein the protein comprises an amino acid sequence at least about 60% identical to the amino acid sequence of SEQ ID NO:90, SEQ ID NO:102, SEQ ID NO:105, SEQ ID NO:113, the amino acid sequence encoded by the DNA insert of the plasmid deposited with ATCC as Accession Number 98883, or the amino acid sequence encoded by the DNA insert of the plasmid deposited with ATCC as Accession Number 98984. Preferably, the protein encoded by the nucleic acid molecule is at least about 65-70% identical to SEQ ID NO:90, SEQ ID NO:102, SEQ ID NO:105, SEQ ID NO:113, the amino acid sequence encoded by the DNA insert of the plasmid deposited with ATCC as Accession Number 98883, or the amino acid sequence encoded by the DNA insert of the plasmid deposited with ATCC as Accession Number 98984, more preferably at least about 75-80% identical to SEQ ID NO:90, SEQ ID NO:102, SEQ ID NO:105, SEQ ID NO:113, the amino acid sequence encoded by the DNA insert of the plasmid deposited with ATCC as Accession Number 98883, or the amino acid sequence encoded by the DNA insert of the plasmid deposited with ATCC as Accession Number 98984, even more preferably at least about 85-90% identical to SEQ ID NO:90, SEQ ID NO:102, SEQ ID NO:105, SEQ ID NO:113, the amino acid sequence encoded by the DNA insert of the plasmid deposited with ATCC as Accession Number 98883, or the amino acid sequence encoded by the DNA insert of the plasmid deposited with ATCC as Accession Number 98984, and most preferably at least about 95% identical to SEQ ID NO:90, SEQ ID NO:102, SEQ ID NO:105, SEQ ID NO:113, the amino acid sequence encoded by the DNA insert of the plasmid deposited with ATCC as Accession Number 98883, or the amino acid sequence encoded by the DNA insert of the plasmid deposited with ATCC as Accession Number 98984.

[0589] An isolated nucleic acid molecule encoding a SPOIL protein homologous to the protein of SEQ ID NO:90, SEQ ID NO:102, SEQ ID NO:105, SEQ ID NO:113, the amino acid sequence encoded by the DNA insert of the plasmid deposited with ATCC as Accession Number 98883, or the amino acid sequence encoded by the DNA insert of the plasmid deposited with ATCC as Accession Number 98984, can be created by introducing one or more nucleotide substitutions, additions or deletions into the nucleotide sequence of SEQ ID NO:90, SEQ ID NO:102, SEQ ID NO:105, SEQ ID NO:113, the DNA insert of the plasmid deposited with ATCC as Accession Number 98883, or the DNA insert of the plasmid deposited with ATCC as Accession Number 98984, such that one or more amino acid substitutions, additions or deletions are introduced into the encoded protein. Mutations can be introduced into SEQ ID NO:89, SEQ ID NO:101, SEQ ID NO:104, SEQ ID NO:112, the DNA insert of the plasmid deposited with ATCC as Accession Number 98883, or the DNA insert of the plasmid deposited with ATCC as Accession Number 98984, by standard techniques, such as site-directed mutagenesis and PCR-mediated mutagenesis.

[0590] Alternatively, in another embodiment, mutations can be introduced randomly along all or part of a SPOIL coding sequence, such as by saturation mutagenesis, and the resultant mutants can be screened for SPOIL biological activity to identify mutants that retain activity. Following mutagenesis of SEQ ID NO:89, SEQ ID NO:101, SEQ ID NO:104, SEQ ID NO:112, the DNA insert of the plasmid deposited with ATCC as Accession Number 98883, or the DNA insert of the plasmid deposited with ATCC as Accession Number 98984, the encoded protein can be expressed recombinantly and the activity of the protein can be determined.

[0591] In a preferred embodiment, a mutant SPOIL-I protein can be assayed for (1) the ability to modulate IL-1 signal transduction, either in vitro or in vivo; (2) modulate IL-1 stimulated cell development or differentiation, either in vitro or in vivo; and (3) modulate IL-1 stimulated cellular proliferation, either in vitro or in vivo. In yet another preferred embodiment, a mutant SPOIL can be assayed for ability to 1) modulate cellular signal transduction; 2) regulate cellular proliferation; 3) regulate cellular differentiation; 4) modulate a cell involved in immune response; and 5) modulate a cell involved in bone metabolism (e.g. osteoblast or osteoclasts).

[0592] Moreover, nucleic acid molecules encoding other NEOKINE family members (e.g., NEOKINE-2), and thus which have a nucleotide sequence which differs from the NEOKINE-1 sequences of SEQ ID NO:115, SEQ ID NO:118, SEQ ID NO:121, SEQ ID NO:124, or the nucleotide sequence of the DNA insert of the plasmid deposited with ATCC as Accession Number 98751 are intended to be within the scope of the invention. For example, a NEOKINE-2 cDNA can be identified based on the nucleotide sequence of human NEOKINE-1. Moreover, nucleic acid molecules encoding NEOKINE proteins from different species, and thus which have a nucleotide sequence which differs from the NEOKINE sequences of SEQ ID NO:115, SEQ ID NO:118, SEQ ID NO:121, SEQ ID NO:124, or the nucleotide sequence of the DNA insert of the plasmid deposited with ATCC as Accession Number 98751 are intended to be within the scope of the invention. For example, a Xenopus NEOKINE cDNA can be identified based on the nucleotide sequence of a human NEOKINE.

[0593] Nucleic acid molecules corresponding to natural allelic variants and homologues of the NEOKINE cDNAs of the invention can be isolated based on their homology to the NEOKINE nucleic acids disclosed herein using the cDNAs disclosed herein, or a portion thereof, as a hybridization probe according to standard hybridization techniques under stringent hybridization conditions.

[0594] Accordingly, in another embodiment, an isolated nucleic acid molecule of the invention is at least 15 nucleotides in length and hybridizes under stringent conditions to the nucleic acid molecule comprising the nucleotide sequence of SEQ ID NO:115, SEQ ID NO:118, SEQ ID NO:121, SEQ ID NO:124, or the nucleotide sequence of the DNA insert of the plasmid deposited with ATCC as Accession Number 98751. In other embodiment, the nucleic acid is at least 30, 50, 100, 250 or 500 nucleotides in length. As used herein, the term “hybridizes under stringent conditions” is intended to describe conditions for hybridization and washing under which nucleotide sequences at least 60% homologous to each other typically remain hybridized to each other. Preferably, the conditions are such that sequences at least about 70%, more preferably at least about 80%, even more preferably at least about 85% or 90% homologous to each other typically remain hybridized to each other. Such stringent conditions are known to those skilled in the art and can be found in Current Protocols in Molecular Biology, John Wiley & Sons, N.Y. (1989), 6.3.1-6.3.6. A preferred, non-limiting example of stringent hybridization conditions are hybridization in 6× sodium chloride/sodium citrate (SSC) at about 45° C., followed by one or more washes in 0.2×SSC, 0.1% SDS at 50° C., preferably 55° C., and more preferably 60° C. or 65° C. Preferably, an isolated nucleic acid molecule of the invention that hybridizes under stringent conditions to the sequence of SEQ ID NO:115, SEQ ID NO:118, SEQ ID NO:121, SEQ ID NO:124, corresponds to a naturally-occurring nucleic acid molecule. As used herein, a “naturally-occurring” nucleic acid molecule refers to an RNA or DNA molecule having a nucleotide sequence that occurs in nature (e.g., encodes a natural protein).

[0595] In addition to naturally-occurring allelic variants of the NEOK1NE sequences that may exist in the population, the skilled artisan will further appreciate that changes can be introduced by mutation into the nucleotide sequences of SEQ ID NO:115, SEQ ID NO:118, SEQ ID NO:121, SEQ ID NO:124, or the nucleotide sequence of the DNA insert of the plasmid deposited with ATCC as Accession Number 98751, thereby leading to changes in the amino acid sequence of the encoded NEOKINE proteins, without altering the functional ability of the NEOKINE proteins. For example, nucleotide substitutions leading to amino acid substitutions at “non-essential” amino acid residues can be made in the sequence of SEQ ID NO:115, SEQ ID NO:118, SEQ ID NO:121, SEQ ID NO:124, or the nucleotide sequence of the DNA insert of the plasmid deposited with ATCC as Accession Number 98751. A “non-essential” amino acid residue is a residue that can be altered from the wild-type sequence of NEOKINE (e.g., the sequence of SEQ ID NO:116, SEQ ID NO:119, SEQ ID NO:122, or SEQ ID NO:125) without altering the biological activity, whereas an “essential” amino acid residue is required for biological activity. For example, amino acid residues that are conserved among the NEOKINE proteins of the present invention, are predicted to be particularly unamenable to alteration (e.g., the four conserved cycteines). Moreover, amino acid residues that are defined by the NEOKINE CXC motif are particularly unamenable to alteration. Furthermore, additional amino acid residues that are conserved between the NEOKINE proteins of the present invention as depicted in FIG. 8 are not likely to be amenable to alteration.

[0596] Accordingly, another aspect of the invention pertains to nucleic acid molecules encoding NEOKINE proteins that contain changes in amino acid residues that are not essential for activity. Such NEOKINE proteins differ in amino acid sequence from SEQ ID NO:116, SEQ ID NO:119, SEQ ID NO:122, or SEQ ID NO:125 yet retain biological activity. In one embodiment, the isolated nucleic acid molecule comprises a nucleotide sequence encoding a protein, wherein the protein comprises an amino acid sequence at least about 60% homologous to the amino acid sequence of SEQ ID NO:116, SEQ ID NO:119, SEQ ID NO:122, or SEQ ID NO:125. Preferably, the protein encoded by the nucleic acid molecule is at least about 65-70% homologous to SEQ ID NO:116, SEQ ID NO:119, SEQ ID NO:122, or SEQ ID NO:125, more preferably at least about 75-80% homologous to SEQ ID NO:116, SEQ ID NO:119, SEQ ID NO:122, or SEQ ID NO:125, even more preferably at least about 85-90% homologous to SEQ ID NO:116, SEQ ID NO:119, SEQ ID NO:122, or SEQ ID NO:125, and most preferably at least about 95% homologous to SEQ ID NO:116, SEQ ID NO:119, SEQ ID NO:122, or SEQ ID NO:125.

[0597] An isolated nucleic acid molecule encoding a NEOKINE protein homologous to the protein of SEQ ID NO:116, SEQ ID NO:119, SEQ ID NO:122, or SEQ ID NO:125 can be created by introducing one or more nucleotide substitutions, additions or deletions into the nucleotide sequence of SEQ ID NO:115, SEQ ID NO:118, SEQ ID NO:121, SEQ ID NO:124, or the nucleotide sequence of the DNA insert of the plasmid deposited with ATCC as Accession Number 98751, such that one or more amino acid substitutions, additions or deletions are introduced into the encoded protein. Mutations can be introduced into SEQ ID NO:115, SEQ ID NO:118, SEQ ID NO:121, SEQ ID NO:124, or the nucleotide sequence of the DNA insert of the plasmid deposited with ATCC as Accession Number 98751 by standard techniques, such as site-directed mutagenesis and PCR-mediated mutagenesis. Thus, a predicted nonessential amino acid residue in a NEOKINE protein is preferably replaced with another amino acid residue from the same side chain family. Alternatively, in another embodiment, mutations can be introduced randomly along all or part of a NEOKINE coding sequence, such as by saturation mutagenesis, and the resultant mutants can be screened for NEOKINE biological activity to identify mutants that retain activity. Following mutagenesis of SEQ ID NO:115, SEQ ID NO:118, SEQ ID NO:121, SEQ ID NO:124, or the nucleotide sequence of the DNA insert of the plasmid deposited with ATCC as Accession Number 98751, the encoded protein can be expressed recombinantly and the activity of the protein can be determined.

[0598] In a preferred embodiment, a mutant NEOKINE protein can be assayed for (1) modulation of cellular signal transduction, either in vitro or in vivo; (2) regulation of gene transcription in a cell expressing a NEOKINE receptor (e.g., RDC1) or receptor which is specific for another chemokine; (3) regulation of gene transcription in a cell expressing a NEOKINE receptor or receptor which is specific for another chemokine, wherein said cell is involved in angiogenesis or inflammation; (4) regulation of angiogenesis; (5) regulation of angiogenesis, wherein said regulation comprises inhibition of angiogenesis; (6) regulation of angiogenesis, wherein said regulation comprises maintenance of angiostasis; (7) regulation of inflammation; and (8) regulation of inflammation, wherein said regulation comprises inhibition of chemoattraction (e.g., neutrophil chemoattraction).

[0599] The present invention encompasses antisense nucleic acid molecules, i.e., molecules which are complementary to a sense nucleic acid encoding a polypeptide of the invention, e.g., complementary to the coding strand of a double-stranded cDNA molecule or complementary to an mRNA sequence. Accordingly, an antisense nucleic acid can hydrogen bond to a sense nucleic acid. The antisense nucleic acid can be complementary to an entire Delta3, FTHMA-070, Tango85, Tango77, SPOIL, NEOKINE, Tango129 or A259 coding strand, or to only a portion thereof, e.g., all or part of the protein coding region (or open reading frame). An antisense nucleic acid molecule can be antisense to all or part of a Delta3, FTHMA-070, Tango85, Tango77, SPOIL, NEOKINE, Tango129 or A259 non-coding region of the coding strand of a nucleotide sequence encoding a Delta3, FTHMA-070, Tango85, Tango77, SPOIL, NEOKINE, Tango129 or A259 polypeptide of the invention. The non-coding regions (“5′ and 3′ untranslated regions”) are the 5′ and 3′ sequences which flank the coding region and are not translated into amino acids.

[0600] Given the coding strand sequences encoding FTHMA-070 or T85 disclosed herein, antisense nucleic acids of the invention can be designed according to the rules of Watson and Crick base pairing. The antisense nucleic acid molecule can be complementary to the entire coding region of FTHMA-070 or T85 mRNA, but more preferably is an oligonucleotide which is antisense to only a portion of the coding or noncoding region of FTHMA-070 or T85 mRNA.

[0601] Given the coding strand sequences encoding Tango-77 disclosed herein (e.g., SEQ ID NO:73, SEQ ID NO:75, or SEQ ID NO:78), antisense nucleic acids of the invention can be designed according to the rules of Watson and Crick base pairing. The antisense nucleic acid molecule can be complementary to the entire coding region of Tango-77 mRNA, but more preferably is an oligonucleotide which is antisense to only a portion of the coding or noncoding region of Tango-77 mRNA. For example, the antisense oligonucleotide can be complementary to the region surrounding the translation start site of Tango-77 mRNA, e.g., an oligonucleotide having the sequence

(SEQ ID NO: 193)
5′-TGCAACTTTTACAGGAAACAC-3′
or
(SEQ ID NO: 194)
5′-CCTCACTTTTACCCGAGACTC-3′
or
(SEQ ID NO: 195)
5′-GACGGGTGGTACTTAAAACAA-3′.

[0602] Given the coding strand sequences encoding SPOIL disclosed herein (e.g., SEQ ID NO:89, SEQ ID NO:101, SEQ ID NO:104, SEQ ID NO:112, the DNA insert of the plasmid deposited with ATCC as Accession Number 98883, or the DNA insert of the plasmid deposited with ATCC as Accession Number 98984), antisense nucleic acids of the invention can be designed according to the rules of Watson and Crick base pairing. The antisense nucleic acid molecule can be complementary to the entire coding region of SPOIL mRNA, but more preferably is an oligonucleotide which is antisense to only a portion of the coding region of SPOIL mRNA. For example, the antisense oligonucleotide can be complementary to the region surrounding the translation start site of SPOIL mRNA.

[0603] Given the coding strand sequences encoding NEOKINE disclosed herein (e.g., SEQ ID NO:117, SEQ ID NO:120, or SEQ ID NO:123), antisense nucleic acids of the invention can be designed according to the rules of Watson and Crick base pairing. The antisense nucleic acid molecule can be complementary to the entire coding region of NEOKINE mRNA, but more preferably is an oligonucleotide which is antisense to only a portion of the coding or noncoding region of NEOKINE mRNA. For example, the antisense oligonucleotide can be complementary to the region surrounding the translation start site of NEOKINE mRNA.

[0604] Given the coding strand sequences encoding T129 disclosed herein (e.g., SEQ ID NO:137 or SEQ ID NO:139), antisense nucleic acids of the invention can be designed according to the rules of Watson and Crick base pairing. The antisense nucleic acid molecule can be complementary to the entire coding region of T129 mRNA, but more preferably is an oligonucleotide which is antisense to only a portion of the coding or noncoding region of T129 mRNA. For example, the antisense oligonucleotide can be complementary to the region surrounding the translation start site of T129 mRNA, e.g., an oligonucleotide having the sequence

(SEQ ID NO: 143)
CTGGTGGTCCCCGGACTCCTACTTCGGTT
or
(SEQ ID NO: 144)
GACTCCTACTTCGGTTCAGA.

[0605] An antisense oligonucleotide can be, for example, about 5, 10, 15, 20, 25, 30, 35, 40, 45 or 50 nucleotides in length. An antisense nucleic acid of the invention can be constructed using chemical synthesis and enzymatic ligation reactions using procedures known in the art. For example, an antisense nucleic acid (e.g., an antisense oligonucleotide) can be chemically synthesized using naturally-occurring nucleotides or variously modified nucleotides designed to increase the biological stability of the molecules or to increase the physical stability of the duplex formed between the antisense and sense nucleic acids, e.g., phosphorothioate derivatives and acridine substituted nucleotides can be used. Examples of modified nucleotides which can be used to generate the antisense nucleic acid include 5-fluorouracil, 5-bromouracil, 5-chlorouracil, 5-iodouracil, hypoxanthine, xanthine, 4-acetylcytosine, 5-(carboxyhydroxylmethyl)uracil, 5-carboxymethylaminomethyl-2-thiouridine, 5-carboxymethylaminomethyluracil, dihydrouracil, beta-D-galactosylqueosine, inosine, N6-isopentenyladenine, 1-methylguanine, 1-methylinosine, 2,2-dimethylguanine, 2-methyladenine, 2-methylguanine, 3-methylcytosine, 5-methylcytosine, N6-adenine, 7-methylguanine, 5-methylaminomethyluracil, 5-methoxyaminomethyl-2-thiouracil, beta-D-mannosylqueosine, 5′-methoxycarboxymethyluracil, 5-methoxyuracil, 2-methylthio-N-6-isopentenyladenine, uracil-5-oxyacetic acid (v), wybutoxosine, pseudouracil, queosine, 2-thiocytosine, 5-methyl-2-thiouracil, 2-thiouracil, 4-thiouracil, 5-methyluracil, uracil-5-oxyacetic acid methylester, uracil-5-oxyacetic acid (v), 5-methyl-2-thiouracil, 3-(3-amino-3-N2-carboxypropyl) uracil, (acp3)w, and 2,6-diaminopurine. Alternatively, the antisense nucleic acid can be produced biologically using an expression vector into which a nucleic acid has been subcloned in an antisense orientation (i.e., RNA transcribed from the inserted nucleic acid will be of an antisense orientation to a target nucleic acid of interest, described further in the following subsection).

[0606] The antisense nucleic acid molecules of the invention are typically administered, individually or in combination (that is two, threee, four, or more different antisense molecules), to a subject or generated in situ such that they hybridize with or bind to cellular mRNA and/or genomic DNA encoding a selected polypeptide of the invention to thereby inhibit expression, e.g., by inhibiting transcription and/or translation. The hybridization can be by conventional nucleotide complementarity to form a stable duplex, or, for example, in the case of an antisense nucleic acid molecule which binds to DNA duplexes, through specific interactions in the major groove of the double helix. An example of a route of administration of antisense nucleic acid molecules of the invention includes direct injection at a tissue site. Alternatively, antisense nucleic acid molecules can be modified to target selected cells and then administered systemically. For example, for systemic administration, antisense molecules can be modified such that they specifically bind to receptors or antigens expressed on a selected cell surface, e.g., by linking the antisense nucleic acid molecules to peptides or antibodies which bind to cell surface receptors or antigens. The antisense nucleic acid molecules can also be delivered to cells using the vectors described herein. To achieve sufficient intracellular concentrations of the antisense molecules, vector constructs in which the antisense nucleic acid molecule is placed under the control of a strong pol II or pol III promoter are preferred.

[0607] An antisense nucleic acid molecule of the invention can be an α-anomeric nucleic acid molecule. An α-anomeric nucleic acid molecule forms specific double-stranded hybrids with complementary RNA in which, contrary to the usual β-units, the strands run parallel to each other (Gaultier et al. (1987) Nucleic Acids Res. 15:6625-6641). The antisense nucleic acid molecule can also comprise a 2′-o-methylribonucleotide (Inoue et al. (1987) Nucleic Acids Res. 15:6131-6148) or a chimeric RNA-DNA analogue (Inoue et al. (1987) FEBS Lett. 215:327-330).

[0608] The invention also encompasses ribozymes. Ribozymes are catalytic RNA molecules with ribonuclease activity which are capable of cleaving a single-stranded nucleic acid, such as an mRNA, to which they have a complementary region. Thus, ribozymes (e.g., hammerhead ribozymes (described in Haselhoff and Gerlach (1988) Nature 334:585-591)) can be used to catalytically cleave mRNA transcripts to thereby inhibit translation of the protein encoded by the mRNA. A ribozyme having specificity for a nucleic acid molecule encoding a polypeptide of the invention can be designed based upon the nucleotide sequence of a cDNA disclosed herein. For example, a derivative of a Tetrahymena L-19 IVS RNA can be constructed in which the nucleotide sequence of the active site is complementary to the nucleotide sequence to be cleaved in a Cech et al. U.S. Pat. No. 4,987,071; and Cech et al. U.S. Pat. No. 5,116,742. Alternatively, an mRNA encoding a polypeptide of the invention can be used to select a catalytic RNA having a specific ribonuclease activity from a pool of RNA molecules. See, e.g., Bartel and Szostak (1993) Science 261:1411-1418.

[0609] The invention also encompasses nucleic acid molecules which form triple helical structures. For example, expression of a polypeptide of the invention can be inhibited by targeting nucleotide sequences complementary to the regulatory region of the gene encoding the polypeptide (e.g., the promoter and/or enhancer) to form triple helical structures that prevent transcription of the gene in target cells. See generally Helene (1991) Anticancer Drug Des. 6(6):569-84; Helene (1992) Ann. N.Y. Acad. Sci. 660:27-36; and Maher (1992) Bioassays 14(12):807-15.

[0610] In various embodiments, the nucleic acid molecules of the invention can be modified at the base moiety, sugar moiety or phosphate backbone to improve, e.g., the stability, hybridization, or solubility of the molecule. For example, the deoxyribose phosphate backbone of the nucleic acids can be modified to generate peptide nucleic acids (see Hyrup et al. (1996) Bioorganic & Medicinal Chemistry 4(1): 5-23). As used herein, the terms “peptide nucleic acids” or “PNAs” refer to nucleic acid mimics, e.g., DNA mimics, in which the deoxyribose phosphate backbone is replaced by a pseudopeptide backbone and only the four natural nucleobases are retained. The neutral backbone of PNAs has been shown to allow for specific hybridization to DNA and RNA under conditions of low ionic strength. The synthesis of PNA oligomers can be performed using standard solid phase peptide synthesis protocols as described in Hyrup et al. (1996) Bioorganic & Medicinal Chemistry 4(1): 5-23; Perry-O'Keefe et al. (1996) Proc. Natl. Acad. Sci. USA 93: 14670-675.

[0611] PNAs of Delta3, FTHMA-070, Tango85, Tango77, SPOIL, NEOKINE, Tango129 and A259 can be used in therapeutic and diagnostic applications. For example, PNAs can be used as antisense or antigene agents for sequence-specific modulation of gene expression by, e.g., inducing transcription or translation arrest or inhibiting replication. PNAs can also be used, e.g., in the analysis of single base pair mutations in a gene by, e.g., PNA directed PCR clamping; as artificial restriction enzymes when used in combination with other enzymes, e.g., S1 nucleases (Hyrup et al. (1996) Bioorganic & Medicinal Chemistry 4(1): 5-23; or as probes or primers for DNA sequence and hybridization (Hyrup et al. (1996) Bioorganic & Medicinal Chemistry 4(1): 5-23; Perry-O'Keefe et al. (1996) Proc. Natl. Acad. Sci. USA 93: 14670-675).

[0612] In another embodiment, PNAs of Delta3, FTHMA-070, Tango85, Tango77, SPOIL, NEOKINE, Tango129 and A259 can be modified, e.g., to enhance their stability or cellular uptake, by attaching lipophilic or other helper groups to PNA, by the formation of PNA-DNA chimeras, or by the use of liposomes or other techniques of drug delivery known in the art. For example, PNA-DNA chimeras can be generated which may combine the advantageous properties of PNA and DNA. Such chimeras allow DNA recognition enzymes, e.g., RNAse H and DNA polymerases, to interact with the DNA portion while the PNA portion would provide high binding affinity and specificity. PNA-DNA chimeras can be linked using linkers of appropriate lengths selected in terms of base stacking, number of bonds between the nucleobases, and orientation (Hyrup et al. (1996) Bioorganic & Medicinal Chemistry 4(1): 5-23). The synthesis of PNA-DNA chimeras can be performed as described in Hyrup et al. (1996) Bioorganic & Medicinal Chemistry 4(1): 5-23, and Finn et al. (1996) Nucleic Acids Res. 24(17):3357-63. For example, a DNA chain can be synthesized on a solid support using standard phosphoramidite coupling chemistry and modified nucleoside analogs. Compounds such as 5′-(4-methoxytrityl)amino-5′-deoxy-thymidine phosphoramidite can be used as a link between the PNA and the 5′ end of DNA (Mag et al. (1989) Nucleic Acids Res. 17:5973-88). PNA monomers are then coupled in a stepwise manner to produce a chimeric molecule with a 5′ PNA segment and a 3′ DNA segment (Finn et al. (1996) Nucleic Acids Res. 24(17):3357-63). Alternatively, chimeric molecules can be synthesized with a 5′ DNA segment and a 3′ PNA segment (Peterser et al. (1975) Bioorganic Med. Chem. Lett. 5:1119-11124).

[0613] In other embodiments, the oligonucleotide may include other appended groups such as peptides (e.g., for targeting host cell receptors in vivo), or agents facilitating transport across the cell membrane (see, e.g., Letsinger et al. (1989) Proc. Natl. Acad. Sci. USA 86:6553-6556; Lemaitre et al. (1987) Proc. Natl. Acad. Sci. USA 84:648-652; PCT Publication NO: WO 88/09810) or the blood-brain barrier (see, e.g., PCT Publication NO: WO 89/10134). In addition, oligonucleotides can be modified with hybridization-triggered cleavage agents (see, e.g., Krol et al. (1988) Bio/Techniques 6:958-976) or intercalating agents (see, e.g., Zon (1988) Pharm. Res. 5:539-549). To this end, the oligonucleotide may be conjugated to another molecule, e.g., a peptide, hybridization triggered cross-linking agent, transport agent, hybridization-triggered cleavage agent, etc.

[0614] Nucleic acids having a sequence that differs from the nucleotide sequences shown in one of SEQ ID Nos: 1, 3, 24, 26, 27, 29, 31, 33, 35, 37, 39, 41, 43 or 45 due to degeneracy in the genetic code are also within the scope of the invention. Such nucleic acids encode functionally equivalent peptides (i.e., a peptide having a biological activity of a Delta3 polypeptide) but differ from the sequence shown in the sequence listing due to degeneracy in the genetic code. For example, a number of amino acids are designated by more than one triplet. Codons that specify the same amino acid, or synonyms (for example, CAU and CAC each encode histidine) may result in “silent” mutations which do not affect the amino acid sequence of a Delta3 polypeptide. However, it is expected that DNA sequence polymorphisms that do lead to changes in the amino acid sequences of the subject Delta3 polypeptides will exist. One skilled in the art will appreciate that these variations in one or more nucleotides (e.g., up to about 3-5% of the nucleotides) of the nucleic acids encoding polypeptides having an activity of a Delta3 polypeptide may exist among individuals of a given species due to natural allelic variation.

[0615] As indicated by the examples set out below, Delta3 protein-encoding nucleic acids can be obtained from mRNA present in any of a number of eukaryotic cells. It should also be possible to obtain nucleic acids encoding Delta3 polypeptides of the present invention from genomic DNA from both adults and embryos. For example, a gene encoding a Delta3 protein can be cloned from either a cDNA or a genomic library in accordance with protocols described herein, as well as those generally known to persons skilled in the art. Examples of tissues and/or libraries suitable for isolation of the subject nucleic acids include endothelial cell libraries, among others. A cDNA encoding a Delta3 protein can be obtained by isolating total mRNA from a cell, e.g., a vertebrate cell, a mammalian cell, or a human cell, including embryonic cells. Double stranded cDNAs can then be prepared from the total mRNA, and subsequently inserted into a suitable plasmid or bacteriophage vector using any one of a number of known techniques. The gene encoding a Delta3 protein can also be cloned using established polymerase chain reaction techniques in accordance with the nucleotide sequence information provided by the invention. The nucleic acid of the invention can be DNA or RNA. A preferred nucleic acid is a cDNA represented by a sequence selected from the group consisting of SEQ ID NOs: 1, 3, 24, 26, 27, 29, 31, 33, 35, 37, 39, 41, 43 or 45.

### Delta3 Vectors

[0616] This invention also provides expression vectors containing a nucleic acid encoding a Delta3 polypeptide, operably linked to at least one transcriptional regulatory sequence. “Operably linked” is intended to mean that the nucleotide sequence is linked to a regulatory sequence in a manner which allows expression of the nucleotide sequence. Regulatory sequences are art-recognized and are selected to direct expression of the subject Delta3 proteins. Accordingly, the term “transcriptional regulatory sequence” includes promoters, enhancers and other expression control elements. Such regulatory sequences are described in Goeddel; Gene Expression Technology: Methods in Enzymology 185, Academic Press, San Diego, Calif. (1990). In one embodiment, the expression vector includes a recombinant gene encoding a peptide having an agonistic activity of a subject Delta3 polypeptide, or alternatively, encoding a peptide which is an antagonistic form of the Delta3 protein. Such expression vectors can be used to transfect cells and thereby produce polypeptides, including fusion proteins, encoded by nucleic acids as described herein. Moreover, the gene constructs of the present invention can also be used as a part of a gene therapy protocol to deliver nucleic acids encoding either an agonistic or antagonistic form of one of the subject Delta3 proteins. Thus, another aspect of the invention features expression vectors for in vivo or in vitro transfection and expression of a Delta3 polypeptide in particular cell types so as to reconstitute the function of, or alternatively, abrogate the function of Delta-induced signaling in a tissue. This could be desirable, for example, when the naturally-occurring form of the protein is expressed inappropriately; or to deliver a form of the protein which alters differentiation of tissue. Expression vectors may also be employed to inhibit neoplastic transformation.

[0617] In addition to viral transfer methods, such as those illustrated above, non-viral methods can also be employed to cause expression of a subject Delta3 polypeptide in the tissue of an animal. Most nonviral methods of gene transfer rely on normal mechanisms used by mammalian cells for the uptake and intracellular transport of macromolecules. In preferred embodiments, non-viral targeting means of the present invention rely on endocytic pathways for the uptake of the subject Delta3 polypeptide gene by the targeted cell. Exemplary targeting means of this type include liposomal derived systems, polylysine conjugates, and artificial viral envelopes.

### Delta3 Probes and Primers

[0618] Moreover, the nucleotide sequences determined from the cloning of hDelta3 genes will further allow for the generation of probes and primers designed for use in identifying and/or cloning Delta3 homologs in other cell types, e.g., from other tissues, as well as Delta3 homologs from other mammalian organisms. Probes and primers of the invention can also be used to determine the identity of a Delta3 allele and/or the presence or absence of one or more mutations in a Delta3 gene of a subject. In a preferred embodiment, a probe or primer of the invention can be used to determine whether a subject has or is at risk of developing a disease or condition associated with a specific Delta3 allele, such as an allele carrying a mutation.

[0619] In a preferred embodiment, the present invention also provides a probe/primer comprising a substantially purified oligonucleotide, which oligonucleotide comprises a region of nucleotide sequence that hybridizes under stringent conditions to at least about 12, preferably about 25, more preferably about 40, 50 or 75 consecutive nucleotides of sense or anti-sense sequence selected from the group consisting of SEQ ID NO:1, 3, 24, 26, 27, 29, 31, 33, 35, 37, 39, 41, 43 or 45, or naturally-occurring mutants thereof. For instance, primers based on the nucleic acid represented in SEQ ID NOs:1, 3, 24, 26, 27, 29, 31, 33, 35, 37, 39, 41, 43 or 45 can be used in PCR reactions to clone Delta3 homologs, e.g., specific Delta3 alleles. Such primers are preferably selected in a region which does not share significant homology to other genes, e.g., other Delta genes. Examples of primers of the invention are set forth as SEQ ID NOs:12-15, set forth below:

5′ end primers:
(SEQ ID NO: 12; corresponding to nucleotides
356 to 375 of SEQ ID NO: 1)
5′ AGCGCCTCTGGCTGGGCGCT 3′;
(SEQ ID NO: 13; corresponding to nucleotides
725 to 744 of SEQ ID NO: 1)
5′ CGGCCAGAGGCCTTGCCACC 3′;
3′ end primers:
(SEQ ID NO: 14; corresponding to the complement of
nucleotides 1460 to 1479 of SEQ ID NO: 1)
5′ TTGCGCTCCCGGCTGGAGCC 3′;
and
(SEQ ID NO: 15; corresponding to the complement of
nucleotides 1592 to 2611 of SEQ ID NO: 1)
5′ ATGCGGCTTGGACCTCGGTT 3′.

[0620] Likewise, probes based on the subject Delta3 sequences can be used to detect transcripts or genomic sequences encoding the same or homologous proteins. In preferred embodiments, the probe further comprises a label group attached thereto and able to be detected, e.g., the label group is selected from amongst radioisotopes, fluorescent compounds, enzymes, and enzyme co-factors.

[0621] As discussed in more detail below, such probes can also be used as a part of a diagnostic test kit for identifying cells or tissue which misexpress a Delta3 protein, such as by measuring a level of a Delta-encoding nucleic acid in a sample of cells from a patient; e.g., detecting Delta3 mRNA levels or determining whether a genomic Delta3 gene has been mutated or deleted. Briefly, nucleotide probes can be generated from the subject Delta3 genes which facilitate histological screening of intact tissue and tissue samples for the presence (or absence) of Delta-encoding transcripts. Similar to the diagnostic uses of anti-Delta3 antibodies, the use of probes directed to Delta3 messages, or to genomic Delta3 sequences, can be used for both predictive and therapeutic evaluation of allelic mutations which might be manifest in, for example, neoplastic or hyperplastic disorders (e.g., unwanted cell growth) or abnormal differentiation of tissue. Used in conjunction with immunoassays as described herein, the oligonucleotide probes can help facilitate the determination of the molecular basis for a developmental disorder which may involve some abnormality associated with expression (or lack thereof) of a Delta3 protein. For instance, variation in polypeptide synthesis can be differentiated from a mutation in a coding sequence.

[0622] Also within the scope of the invention are kits for determining whether a subject is at risk of developing a disease or condition caused by or contributed by an aberrant Delta3 activity and/or which is associated with one or more specific Delta3 alleles. In a preferred embodiment, the kit can be used for determining whether a subject is at risk of developing a neurological disease or disorder, e.g., a peripheral neuropathy, e.g., ACCPN.

### DELTA3 Antisense, Ribozyme and Triplex Techniques

[0623] One aspect of the invention relates to the use of the isolated nucleic acid in “antisense” therapy. As used herein, “antisense” therapy refers to administration or in situ generation of oligonucleotide molecules or their derivatives which specifically hybridize (e.g., bind) under cellular conditions, with the cellular mRNA and/or genomic DNA encoding one or more of the subject Delta3 proteins so as to inhibit expression of that protein, e.g., by inhibiting transcription and/or translation. The binding may be by conventional base pair complementarity, or, for example, in the case of binding to DNA duplexes, through specific interactions in the major groove of the double helix. In general, “antisense” therapy refers to the range of techniques generally employed in the art, and includes any therapy which relies on specific binding to oligonucleotide sequences.

[0624] An antisense construct of the present invention can be delivered, for example, as an expression plasmid which, when transcribed in the cell, produces RNA which is complementary to at least a unique portion of the cellular mRNA which encodes a Delta3 protein. Alternatively, the antisense construct is an oligonucleotide probe which is generated ex vivo and which, when introduced into the cell causes inhibition of expression by hybridizing with the mRNA and/or genomic sequences of a Delta3 gene. Such oligonucleotide probes are preferably modified oligonucleotides which are resistant to endogenous nucleases, e.g., exonucleases and/or endonucleases, and are therefore stable in vivo. Exemplary nucleic acid molecules for use as antisense oligonucleotides are phosphoramidate, phosphothioate and methylphosphonate analogs of DNA (see also U.S. Pat. Nos. 5,176,996; 5,264,564; and 5,256,775). Additionally, general approaches to constructing oligomers useful in antisense therapy have been reviewed, for example, by Van der Krol et al. (1988) Biotechniques 6:958-976; and Stein et al. (1988) Cancer Res 48:2659-2668.

[0625] With respect to antisense DNA, oligodeoxyribonucleotides derived from the translation initiation site, i.e., the ATG codon which encodes the first methionine of the cDNA, e.g., between the −10 and +10 regions of the Delta3 nucleotide sequence of interest, are preferred. Preferred antisense molecules of the invention are from nucleotides 328 to 348 of SEQ ID NO:1 or nucleotides 38 to 58 of SEQ ID NO:24. Non-limiting examples of preferred human and mouse antisense primers are shown below:

(SEQ ID NO: 16)
5′ TGCCGCCATCCCTCGGGGCGT 3′
(complement to nucleotides 326-346 of SEQ ID NO:
1)
(SEQ ID NO: 17)
5′ GGACGCTGCCGCCATCCCCT 3′
(complement to nucleotides 333-352 of SEQ ID NO:
1)
(SEQ ID NO: 18)
5′ GGACGCTGCCGCCATCCCCTCGGGGCGT 3′
(complement to nucleotides 326-352 of SEQ ID NO:
1)
(SEQ ID NO: 47)
5′ CTCCGGGACGCAGGCGTCATCCCT 3′
(complement to nucleotides 38-58 of SEQ ID NO: 24)
(SEQ ID NO: 48)
5′ ACAGGCGCTCCGGGACGCAGGCGTCATCC 3′
(complement to nucleotides 40-65 of SEQ ID NO: 24)

[0626] Antisense approaches involve the design of oligonucleotides (either DNA or RNA) that are complementary to Delta3 mRNA. The antisense oligonucleotides will bind to the Delta3 mRNA transcripts and prevent translation. Absolute complementarity, although preferred, is not required. A sequence “complementary” to a portion of an RNA, as referred to herein, means a sequence having sufficient complementarity to be able to hybridize with the RNA, forming a stable duplex; in the case of double-stranded antisense nucleic acids, a single strand of the duplex DNA may thus be tested, or triplex formation may be assayed. The ability to hybridize will depend on both the degree of complementarity and the length of the antisense nucleic acid. Generally, the longer the hybridizing nucleic acid, the more base mismatches with an RNA it may contain and still form a stable duplex (or triplex, as the case may be). One skilled in the art can ascertain a tolerable degree of mismatch by use of standard procedures to determine the melting point of the hybridized complex.

[0627] Oligonucleotides that are complementary to the 5′ end of the message, e.g., the 5′ untranslated sequence up to and including the AUG initiation codon, should work most efficiently at inhibiting translation. However, sequences complementary to the 3′ untranslated sequences of mRNAs have recently been shown to be effective at inhibiting translation of mRNAs as well. (Wagner, R. (1994) Nature 372:333). Therefore, oligonucleotides complementary to either the 5′ or 3′ untranslated, non-coding regions of a Delta3 gene could be used in an antisense approach to inhibit translation of endogenous Delta3 mRNA. Oligonucleotides complementary to the 5′ untranslated region of the mRNA should include the complement of the AUG start codon. Antisense oligonucleotides complementary to mRNA coding regions are less efficient inhibitors of translation but could be used in accordance with the invention. Whether designed to hybridize to the 5′, 3′ or coding region of Delta3 mRNA, antisense nucleic acids should be at least six nucleotides in length, and are preferably oligonucleotides ranging from 6 to about 50 nucleotides in length. In certain embodiments, the oligonucleotide is at least 10 nucleotides, at least 17 nucleotides, at least 25 nucleotides, or at least 50 nucleotides.

[0628] Regardless of the choice of target sequence, it is preferred that in vitro studies are first performed to quantitate the ability of the antisense oligonucleotide to quantitate the ability of the antisense oligonucleotide to inhibit gene expression. It is preferred that these studies utilize controls that distinguish between antisense gene inhibition and nonspecific biological effects of oligonucleotides. It is also preferred that these studies compare levels of the target RNA or protein with that of an internal control RNA or protein. Additionally, it is envisioned that results obtained using the antisense oligonucleotide are compared with those obtained using a control oligonucleotide. It is preferred that the control oligonucleotide is of approximately the same length as the test oligonucleotide and that the nucleotide sequence of the oligonucleotide differs from the antisense sequence no more than is necessary to prevent specific hybridization to the target sequence.

[0629] The oligonucleotides can be DNA or RNA or chimeric mixtures or derivatives or modified versions thereof, single-stranded or double-stranded. The oligonucleotide can be modified at the base moiety, sugar moiety, or phosphate backbone, for example, to improve stability of the molecule, hybridization, etc. The oligonucleotide may include other appended groups such as peptides (e.g., for targeting host cell receptors in vivo), or agents facilitating transport across the cell membrane (see, e.g., Letsinger et al. (1989) Proc. Natl. Acad. Sci. U.S.A. 86:6553-6556; Lemaitre et al. (1987) Proc. Natl. Acad. Sci. USA 84:648-652; PCT Publication NO: WO 88/09810, Dec. 15, 1988) or the blood-brain barrier (see, e.g., PCT Publication NO: WO 89/10134, Apr. 25, 1988), hybridization-triggered cleavage agents. (See, e.g., Krol et al. (1988) BioTechniques 6:958-976) or intercalating agents. (See, e.g., Zon (1988) Pharm. Res. 5:539-549). To this end, the oligonucleotide may be conjugated to another molecule, e.g., a peptide, hybridization triggered cross-linking agent, transport agent, hybridization-triggered cleavage agent, etc.

[0630] The anti sense oligonucleotide may comprise at least one modified base moiety which is selected from the group including but not limited to 5-fluorouracil, 5-bromouracil, 5-chlorouracil, 5-iodouracil, hypoxanthine, xantine, 4-acetylcytosine, 5-(carboxyhydroxylmethyl) uracil, 5-carboxymethylaminomethyl-2-thiouridine, 5-carboxymethylaminomethyluracil, dihydrouracil, beta-D-galactosylqueosine, inosine, N6-isopentenyladenine, 1-methylguanine, 1-methylinosine, 2,2-dimethylguanine, 2-methyladenine, 2-methylguanine, 3-methylcytosine, 5-methylcytosine, N6-adenine, 7-methylguanine, 5-methylaminomethyluracil, 5-methoxyaminomethyl-2-thiouracil, beta-D-mannosylqueosine, 5′-methoxycarboxymethyluracil, 5-methoxyuracil, 2-methylthio-N-6-isopentenyladenine, uracil-5-oxyacetic acid (v), wybutoxosine, pseudouracil, queosine, 2-thiocytosine, 5-methyl-2-thiouracil, 2-thiouracil, 4-thiouracil, 5-methyluracil, uracil-5-oxyacetic acid methylester, uracil-5-oxyacetic acid (v), 5-methyl-2-thiouracil, 3-(3-amino-3-N2-carboxypropyl) uracil, (acp3)w, and 2,6-diaminopurine.

[0631] The antisense oligonucleotide may also comprise at least one modified sugar moiety selected from the group including but not limited to arabinose, 2-fluoroarabinose, xylulose, and hexose.

[0632] In yet another embodiment, the antisense oligonucleotide comprises at least one modified phosphate backbone selected from the group consisting of a phosphorothioate, a phosphorodithioate, a phosphoramidothioate, a phosphoramidate, a phosphordiamidate, a methylphosphonate, an alkyl phosphotriester, and a formacetal or analog thereof.

[0633] In yet another embodiment, the antisense oligonucleotide is an α-anomeric oligonucleotide. An α-anomeric oligonucleotide forms specific double-stranded hybrids with complementary RNA in which, contrary to the usual β-units, the strands run parallel to each other (Gautier et al. (1987) Nucl. Acids Res. 15:6625-6641). The oligonucleotide is a 2′-O-methylribonucleotide (Inoue et al. (1987) Nucl. Acids Res. 15:6131-6148), or a chimeric RNA-DNA analogue (Inoue et al. (1987) FEBS Lett. 215:327-330).

[0634] Oligonucleotides of the invention may be synthesized by standard methods known in the art, e.g. by use of an automated DNA synthesizer (such as are commercially available from Biosearch, Applied Biosystems, etc.). As examples, phosphorothioate oligonucleotides may be synthesized by the method of Stein et al. (1988, Nucl. Acids Res. 16:3209), methylphosphonate oligonucleotides can be prepared by use of controlled pore glass polymer supports (Sarin et al. (1988) Proc. Natl. Acad. Sci. U.S.A. 85:7448-7451), etc.

[0635] While antisense nucleic acids complementary to the coding region sequence could be used, those complementary to the transcribed untranslated region are preferred. Antisense nucleic acids overlapping the site of initiation of translation are even more preferred. For example, antisense oligonucleotides as set forth below can be utilized in accordance with the invention.

(SEQ ID NO: 19)
5′ TCAATCTGGCTCTGTTCGCG 3′
(complement to nucleotides 284-303 of SEQ ID NO:
1)
(SEQ ID NO: 20)
5′ CGCTCTCTCCACCCGCGGGCCCTCAA 3′
(complement to nucleotides 300-325 of SEQ ID NO:
1)
(SEQ ID NO: 49)
5′ GGTGTCCTCTCCACCGGACGCGTGGG 3′
(complement to nucleotides 6-31 of SEQ ID NO: 24)
(SEQ ID NO: 50)
5′ GTCCTCTCCACCGGACGCGTGG 3′
(complement to nucleotides 6-28 of SEQ ID NO: 24)

[0636] The antisense molecules should be delivered to cells which express the Delta3 in vivo. A number of methods have been developed for delivering antisense DNA or RNA to cells; e.g., antisense molecules can be injected directly into the tissue site, or modified antisense molecules, designed to target the desired cells (e.g., antisense linked to peptides or antibodies that specifically bind receptors or antigens expressed on the target cell surface) can be administered systematically.

[0637] However, it is often difficult to achieve intracellular concentrations of the antisense sufficient to suppress translation on endogenous mRNAs. Therefore a preferred approach utilizes a recombinant DNA construct in which the antisense oligonucleotide is placed under the control of a strong pol III or pol II promoter. The use of such a construct to transfect target cells in the patient will result in the transcription of sufficient amounts of single stranded RNAs that will form complementary base pairs with the endogenous Delta3 transcripts and thereby prevent translation of the Delta3 mRNA. For example, a vector can be introduced in vivo such that it is taken up by a cell and directs the transcription of an antisense RNA. Such a vector can remain episomal or become chromosomally integrated, as long as it can be transcribed to produce the desired antisense RNA. Such vectors can be constructed by recombinant DNA technology methods standard in the art. Vectors can be plasmid, viral, or others known in the art, used for replication and expression in mammalian cells. Expression of the sequence encoding the antisense RNA can be by any promoter known in the art to act in mammalian, preferably human cells. Such promoters can be inducible or constitutive. Such promoters include but are not limited to: the SV40 early promoter region (Bernoist and Chambon (1981) Nature 290:304-310), the promoter contained in the 3′ long terminal repeat of Rous sarcoma virus (Yamamoto et al. (1980) Cell 22:787-797), the herpes thymidine kinase promoter (Wagner et al. (1981) Proc. Natl. Acad. Sci. U.S.A. 78:1441-1445), the regulatory sequences of the metallothionein gene (Brinster et al. (1982) Nature 296:39-42), etc. Any type of plasmid, cosmid, YAC or viral vector can be used to prepare the recombinant DNA construct which can be introduced directly into the tissue site; e.g., the choroid plexus or hypothalamus. Alternatively, viral vectors can be used which selectively infect the desired tissue; (e.g., for brain, herpesvirus vectors may be used), in which case administration may be accomplished by another route (e.g., systematically).

[0638] Likewise, the antisense constructs of the present invention, by antagonizing the normal biological activity of one of the Delta3 proteins, can be used in the modulation of cellular activity both in vivo and for ex vivo tissue cultures.

[0639] Furthermore, the anti-sense techniques (e.g., microinjection of antisense molecules, or transfection with plasmids whose transcripts are anti-sense with regard to a Delta3 mRNA or gene sequence) can be used to investigate the role of Delta3 in developmental events, as well as the normal cellular function of Delta3 in adult tissue. Such techniques can be utilized in cell culture, but can also be used in the creation of transgenic animals, as detailed below.

[0640] Ribozyme molecules designed to catalytically cleave Delta3 mRNA transcripts can also be used to prevent translation of mRNA and expression of Delta3. (See, e.g., PCT International Publication WO 94/11364, published Oct. 4, 1990; Sarver et al., 1990, Science 247:1222-1225). Ribozymes are enzymatic RNA molecules capable of catalyzing the specific cleavage of RNA. The mechanism of ribozyme action involves sequence specific hybridization of the ribozyme molecule to complementary target RNA, followed by an endonucleolytic cleavage. The composition of ribozyme molecules must include one or more sequences complementary to the target gene mRNA, and must include the well known catalytic sequence responsible for mRNA cleavage. For this sequence, see U.S. Pat. No. 5,093,246. As such within the scope of the invention are engineered hammerhead motif ribozyme molecules that specifically and efficiently catalyze endonucleolytic cleavage of RNA sequences encoding Delta3 proteins.

[0641] Specific ribozyme cleavage sites within any potential RNA target are initially identified by scanning the molecule of interest for ribozyme cleavage sites which include the following sequences, GUA, GUU and GUC. Once identified, short RNA sequences of between 15 and 20 ribonucleotides corresponding to the region of the target gene containing the cleavage site may be evaluated for predicted structural features, such as secondary structure, that may render the oligonucleotide sequence unsuitable. The suitability of candidate sequences may also be evaluated by testing their accessibility to hybridization with complementary oligonucleotides, using ribonuclease protection assays.

[0642] While ribozymes that cleave mRNA at site specific recognition sequences can be used to destroy Delta3 mRNAs, the use of hammerhead ribozymes is preferred. Hammerhead ribozymes cleave mRNAs at locations dictated by flanking regions that form complementary base pairs with the target mRNA. The sole requirement is that the target mRNA have the following sequence of two bases: 5′-UG-3′. The construction and production of hammerhead ribozymes is well known in the art and is described more fully in Haseloff and Gerlach (1988) Nature 334:585-591. There are hundreds of potential hammerhead ribozyme cleavage sites within the nucleotide sequence of human Delta3 cDNA. Preferably the ribozyme is engineered so that the cleavage recognition site is located near the 5′ end of the Delta3 mRNA; i.e., to increase efficiency and minimize the intracellular accumulation of non-functional mRNA transcripts.

[0643] The ribozymes of the present invention also include RNA endoribonucleases (hereinafter “Cech-type ribozymes”) such as the one which occurs naturally in Tetrahymena Thermophila (known as the IVS, or L-19 IVS RNA) and which has been extensively described by Thomas Cech and collaborators (Zaug, et al. (1984) Science, 224:574-578; Zaug and Cech (1986) Science, 231:470-475; Zaug, et al. (1986) Nature 324:429-433; PCT Publication WO 88/04300; Been & Cech (1986) Cell 47:207-216). The Cech-type ribozymes have an eight base pair active site which hybridizes to a target RNA sequence whereafter cleavage of the target RNA takes place. The invention encompasses those Cech-type ribozymes which target eight base-pair active site sequences that are present in Delta3.

[0644] As in the antisense approach, the ribozymes can be composed of modified oligonucleotides (e.g., for improved stability, targeting, etc.) and should be delivered to cells which express the Delta3 in vivo e.g., hypothalamus and/or the choroid plexus. A preferred method of delivery involves using a DNA construct “encoding” the ribozyme under the control of a strong constitutive pol III or pol II promoter, so that transfected cells will produce sufficient quantities of the ribozyme to destroy endogenous Delta3 messages and inhibit translation. Because ribozymes unlike antisense molecules, are catalytic, a lower intracellular concentration is required for efficiency.

[0645] Endogenous Delta3 gene expression can also be reduced by inactivating or “knocking out” the Delta3 gene or its promoter using targeted homologous recombination. (e.g., see Smithies et al. (1985) Nature 317:230-234; Thomas & Capecchi (1987) Cell 51:503-512; Thompson et al. (1989) Cell 5:313-321). For example, a mutant, non-functional Delta3 (or a completely unrelated DNA sequence) flanked by DNA homologous to the endogenous Delta3 gene (either the coding regions or regulatory regions of the Delta3 gene) can be used, with or without a selectable marker and/or a negative selectable marker, to transfect cells that express Delta3 in vivo. Insertion of the DNA construct, via targeted homologous recombination, results in inactivation of the Delta3 gene. Such approaches are particularly suited in the agricultural field where modifications to ES (embryonic stem) cells can be used to generate animal offspring with an inactive Delta3 (e.g., see Thomas & Capecchi (1987) and Thompson (1989), supra). However this approach can be adapted for use in humans provided the recombinant DNA constructs are directly administered or targeted to the required site in vivo using appropriate viral vectors, e.g., herpes virus vectors.

[0646] Alternatively, endogenous Delta3 gene expression can be reduced by targeting deoxyribonucleotide sequences complementary to the regulatory region of the Delta3 gene (i.e., the Delta3 promoter and/or enhancers) to form triple helical structures that prevent transcription of the Delta3 gene in target cells in the body. (See generally, Helene, C. (1991) Anticancer Drug Des. 6(6):569-84; Helene, C., et al. (1992) Ann. N.Y. Acad. Sci. 660:27-36; and Maher, L. J. (1992) Bioassays 14(12):807-15).

[0647] Nucleic acid molecules to be used in triple helix formation for the inhibition of transcription are preferably single stranded and composed of deoxyribonucleotides. The base composition of these oligonucleotides should promote triple helix formation via Hoogsteen base pairing rules, which generally require sizable stretches of either purines or pyrimidines to be present on one strand of a duplex. Nucleotide sequences may be pyrimidine-based, which will result in TAT and CGC triplets across the three associated strands of the resulting triple helix. The pyrimidine-rich molecules provide base complementarity to a purine-rich region of a single strand of the duplex in a parallel orientation to that strand. In addition, nucleic acid molecules may be chosen that are purine-rich, for example, containing a stretch of G residues. These molecules will form a triple helix with a DNA duplex that is rich in GC pairs, in which the majority of the purine residues are located on a single strand of the targeted duplex, resulting in CGC triplets across the three strands in the triplex.

[0648] Alternatively, the potential sequences that can be targeted for triple helix formation may be increased by creating a so called “switchback” nucleic acid molecule. Switchback molecules are synthesized in an alternating 5′-3′,3′-5′ manner, such that they base pair with first one strand of a duplex and then the other, eliminating the necessity for a sizable stretch of either purines or pyrimidines to be present on one strand of a duplex.

[0649] Antisense RNA and DNA, ribozyme, and triple helix molecules of the invention may be prepared by any method known in the art for the synthesis of DNA and RNA molecules. These include techniques for chemically synthesizing oligo-deoxyribonucleotides and oligoribonucleotides well known in the art such as for example solid phase phosphoramidite chemical synthesis. Alternatively, RNA molecules may be generated by in vitro and in vivo transcription of DNA sequences encoding the antisense RNA molecule. Such DNA sequences may be incorporated into a wide variety of vectors which incorporate suitable RNA polymerase promoters such as the T7 or SP6 polymerase promoters. Alternatively, antisense cDNA constructs that synthesize antisense RNA constitutively or inducibly, depending on the promoter used, can be introduced stably into cell lines.

[0650] Moreover, various well-known modifications to nucleic acid molecules may be introduced as a means of increasing intracellular stability and half-life. Possible modifications include but are not limited to the addition of flanking sequences of ribonucleotides or deoxyribonucleotides to the 5′ and/or 3′ ends of the molecule or the use of phosphorothioate or 2′O-methyl rather than phosphodiesterase linkages within the oligodeoxyribonucleotide backbone.

### Delta3, FTHMA-070, Tango85, Tango77, SPOIL, NEOKINE, Tango129 and A259 Recombinant Expression Vectors and Host Cells

[0651] Another aspect of the invention pertains to vectors, preferably expression vectors, containing a nucleic acid encoding Delta3, FTHMA-070, Tango85, Tango77, SPOIL, NEOKINE, Tango129 or A259 (or a portion thereof). As used herein, the term “vector” refers to a nucleic acid molecule capable of transporting another nucleic acid to which it has been linked. One type of vector is a “plasmid”, which refers to a circular double stranded DNA loop into which additional DNA segments can be ligated. Another type of vector is a viral vector, wherein additional DNA segments can be ligated into the viral genome. Certain vectors are capable of autonomous replication in a host cell into which they are introduced (e.g., bacterial vectors having a bacterial origin of replication and episomal mammalian vectors). Other vectors (e.g., non-episomal mammalian vectors) are integrated into the genome of a host cell upon introduction into the host cell, and thereby are replicated along with the host genome. Moreover, certain vectors, expression vectors, are capable of directing the expression of genes to which they are operatively linked. In general, expression vectors of utility in recombinant DNA techniques are often in the form of plasmids (vectors). However, the invention is intended to include such other forms of expression vectors, such as viral vectors (e.g., replication defective retroviruses, adenoviruses and adeno-associated viruses), which serve equivalent functions.

[0652] The recombinant expression vectors of the invention comprise a nucleic acid of the invention in a form suitable for expression of the nucleic acid in a host cell, which means that the recombinant expression vectors include one or more regulatory sequences, selected on the basis of the host cells to be used for expression, which is operatively linked to the nucleic acid sequence to be expressed. Within a recombinant expression vector, “operably linked” is intended to mean that the nucleotide sequence of interest is linked to the regulatory sequence(s) in a manner which allows for expression of the nucleotide sequence (e.g., in an in vitro transcription/translation system or in a host cell when the vector is introduced into the host cell). The term “regulatory sequence” is intended to include promoters, enhancers and other expression control elements (e.g., polyadenylation signals). Such regulatory sequences are described, for example, in Goeddel; Gene Expression Technology: Methods in Enzymology 185, Academic Press, San Diego, Calif. (1990). Regulatory sequences include those which direct constitutive expression of a nucleotide sequence in many types of host cell and those which direct expression of the nucleotide sequence only in certain host cells (e.g., tissue-specific regulatory sequences). It will be appreciated by those skilled in the art that the design of the expression vector can depend on such factors as the choice of the host cell to be transformed, the level of expression of protein desired, etc. The expression vectors of the invention can be introduced into host cells to thereby produce proteins or peptides, including fusion proteins or peptides, encoded by nucleic acids as described herein (e.g., Delta3, FTHMA-070, Tango85, Tango77, SPOIL, NEOKINE, Tango129 or A259 proteins, mutant forms of Delta3, FTHMA-070, Tango85, Tango77, SPOIL, NEOKINE, Tango129 or A259, fusion proteins, etc.).

[0653] The recombinant expression vectors of the invention can be designed for expression of Delta3, FTHMA-070, Tango85, Tango77, SPOIL, NEOKINE, Tango129 or A259 in prokaryotic or eukaryotic cells, e.g., bacterial cells such as E. coli, insect cells (using baculovirus expression vectors) yeast cells or mammalian cells. Suitable host cells are discussed further in Goeddel, Gene Expression Technology: Methods in Enzymology 185, Academic Press, San Diego, Calif. (1990). Alternatively, the recombinant expression vector can be transcribed and translated in vitro, for example using T7 promoter regulatory sequences and T7 polymerase.

[0654] Expression of proteins in prokaryotes is most often carried out in E. coli with vectors containing constitutive or inducible promoters directing the expression of either fusion or non-fusion proteins. Fusion vectors add a number of amino acids to a protein encoded therein, usually to the amino terminus of the recombinant protein. Such fusion vectors typically serve three purposes: 1) to increase expression of recombinant protein; 2) to increase the solubility of the recombinant protein; and 3) to aid in the purification of the recombinant protein by acting as a ligand in affinity purification. Often, in fusion expression vectors, a proteolytic cleavage site is introduced at the junction of the fusion moiety and the recombinant protein to enable separation of the recombinant protein from the fusion moiety subsequent to purification of the fusion protein. Such enzymes, and their cognate recognition sequences, include Factor Xa, thrombin and enterokinase. Typical fusion expression vectors include pGEX (Pharmacia Biotech Inc; Smith and Johnson (1988) Gene 67:31-40), pMAL (New England Biolabs, Beverly, Mass.) and pRIT5 (Pharmacia, Piscataway, N.J.) which fuse glutathione S-transferase (GST), maltose E binding protein, or protein A, respectively, to the target recombinant protein.

[0655] Examples of suitable inducible non-fusion E. coli expression vectors include pTrc (Amann et al., (1988) Gene 69:301-315) and pET 11d (Studier et al., Gene Expression Technology: Methods in Enzymology 185, Academic Press, San Diego, Calif. (1990) 60-89). Target gene expression from the pTrc vector relies on host RNA polymerase transcription from a hybrid trp-lac fusion promoter. Target gene expression from the pET 11d vector relies on transcription from a T7 gn10-lac fusion promoter mediated by a coexpressed viral RNA polymerase (T7 gnl). This viral polymerase is supplied by host strains BL21(DE3) or HMS174(DE3) from a resident λ prophage harboring a 17 gn 1 gene under the transcriptional control of the lacUV 5 promoter.

[0656] One strategy to maximize recombinant protein expression in E. coli is to express the protein in a host bacteria with an impaired capacity to proteolytically cleave the recombinant protein (Gottesman, Gene Expression Technology: Methods in Enzymology 185, Academic Press, San Diego, Calif. (1990) 119-128). Another strategy is to alter the nucleic acid sequence of the nucleic acid to be inserted into an expression vector so that the individual codons for each amino acid are those preferentially utilized in E. coli (Wada et al. (1992) Nucleic Acids Res. 20:2111-2118). Such alteration of nucleic acid sequences of the invention can be carried out by standard DNA synthesis techniques.

[0657] In another embodiment, the Delta3, FTHIVIA-070, Tango85, Tango77, SPOIL, NEOKINE, Tango129 or A259 expression vector is a yeast expression vector. Examples of vectors for expression in yeast S. cerivisae include pYepSec1 (Baldari et al. (1987) EMBO J. 6:229-234), pMFa (Kurjan and Herskowitz, (1982) Cell 30:933-943), pJRY88 (Schultz et al. (1987) Gene 54:113-123), pYES2 (Invitrogen Corporation, San Diego, Calif.), and picZ (InVitrogen Corp, San Diego, Calif.).

[0658] Alternatively, Delta3, FTHIMA-070, Tango85, Tango77, SPOIL, NEOKINE, Tango129 or A259 can be expressed in insect cells using baculovirus expression vectors. Baculovirus vectors available for expression of proteins in cultured insect cells (e.g., Sf 9 cells) include the pAc series (Smith et al. (1983) Mol. Cell. Biol. 3:2156-2165) and the pVL series (Lucklow and Summers (1989) Virology 170:31-39).

[0659] In yet another embodiment, a nucleic acid of the invention is expressed in mammalian cells using a mammalian expression vector. Examples of mammalian expression vectors include pCDM8 (Seed (1987) Nature 329:840) and pMT2PC (Kaufman et al. (1987) EMBO J. 6:187-195). When used in mammalian cells, the expression vector's control functions are often provided by viral regulatory elements. For example, commonly used promoters are derived from polyoma, Adenovirus 2, cytomegalovirus and Simian Virus 40. For other suitable expression systems for both prokaryotic and eukaryotic cells see chapters 16 and 17 of Sambrook et al. (1989) Cold Spring Harbor Laboratory (supra).

[0660] In another embodiment, the recombinant mammalian expression vector is capable of directing expression of the nucleic acid preferentially in a particular cell type (e.g., tissue-specific regulatory elements are used to express the nucleic acid). Tissue-specific regulatory elements are known in the art. Non-limiting examples of suitable tissue-specific promoters include the albumin promoter (liver-specific; Pinkert et al. (1987) Genes Dev. 1:268-277), lymphoid-specific promoters (Calame and Eaton (1988) Adv. Immunol. 43:235-275), in particular promoters of T cell receptors (Winoto and Baltimore (1989) EMBO J. 8:729-733) and immunoglobulins (Banerji et al. (1983) Cell 33:729-740; Queen and Baltimore (1983) Cell 33:741-748), neuron-specific promoters (e.g., the neurofilament promoter; Byrne and Ruddle (1989) Proc. Natl. Acad. Sci. USA 86:5473-5477), pancreas-specific promoters (Edlund et al. (1985) Science 230:912-916), and mammary gland-specific promoters (e.g., milk whey promoter; U.S. Pat. No. 4,873,316 and European Application Publication No. 264,166). Developmentally-regulated promoters are also encompassed, for example the murine hox promoters (Kessel and Gruss (1990) Science 249:374-379) and the α-fetoprotein promoter (Camper and Tilghman (1989) Genes Dev. 3:537-546).

[0661] The invention further provides a recombinant expression vector comprising a DNA molecule of the invention cloned into the expression vector in an antisense orientation. That is, the DNA molecule is operatively linked to a regulatory sequence in a manner which allows for expression (by transcription of the DNA molecule) of an RNA molecule which is antisense to Delta3, FTHMA-070, Tango85, Tango77, SPOIL, NEOKINE, Tango129 or A259 mRNA. Regulatory sequences operatively linked to a nucleic acid cloned in the antisense orientation can be chosen which direct the continuous expression of the antisense RNA molecule in a variety of cell types, for instance viral promoters and/or enhancers, or regulatory sequences can be chosen which direct constitutive, tissue specific or cell type specific expression of antisense RNA. The antisense expression vector can be in the form of a recombinant plasmid, phagemid or attenuated virus in which antisense nucleic acids are produced under the control of a high efficiency regulatory region, the activity of which can be determined by the cell type into which the vector is introduced. For a discussion of the regulation of gene expression using antisense genes See Weintraub et al., Reviews—Trends in Genetics, Vol. 1(1) 1986.

[0662] Another aspect of the invention pertains to host cells into which a recombinant expression vector of the invention has been introduced.

[0663] Another aspect of the invention pertains to host cells into which a SPOIL nucleic acid molecule of the invention is introduced, e.g., a SPOIL nucleic acid molecule within a recombinant expression vector or a SPOIL nucleic acid molecule in a form suitable for homologous recombination in the genome of a host cell (e.g., a SPOIL nucleic acid molecule which includes SPOIL nucleotide sequences and additional 5′ and 3′ flanking sequences necessary for homologous recombination).

[0664] The terms “host cell” and “recombinant host cell” are used interchangeably herein. It is understood that such terms refer not only to the particular subject cell but to the progeny or potential progeny of such a cell. Because certain modifications may occur in succeeding generations due to either mutation or environmental influences, such progeny may not, in fact, be identical to the parent cell, but are still included within the scope of the term as used herein.

[0665] A host cell can be any prokaryotic or eukaryotic cell. For example, Delta3, FTHMA-070, Tango85, Tango77, SPOIL, NEOKINE, Tango129 or A259 protein can be expressed in bacterial cells such as E. coli, insect cells, yeast or mammalian cells (such as Chinese hamster ovary cells (CHO) or COS cells). Other suitable host cells are known to those skilled in the art.

[0666] Vector DNA can be introduced into prokaryotic or eukaryotic cells via conventional transformation or transfection techniques. As used herein, the terms “transformation” and “transfection” are intended to refer to a variety of art-recognized techniques for introducing foreign nucleic acid (e.g., DNA) into a host cell, including calcium phosphate or calcium chloride co-precipitation, DEAE-dextran-mediated transfection, lipofection, or electroporation. Suitable methods for transforming or transfecting host cells can be found in Sambrook, et al. (supra), and other laboratory manuals.

[0667] For stable transfection of mammalian cells, it is known that, depending upon the expression vector and transfection technique used, only a small fraction of cells may integrate the foreign DNA into their genome. In order to identify and select these integrants, a gene that encodes a selectable marker (e.g., resistance to antibiotics) is generally introduced into the host cells along with the gene of interest. Preferred selectable markers include those which confer resistance to drugs, such as G418, hygromycin and methotrexate. Nucleic acid encoding a selectable marker can be introduced into a host cell on the same vector as that encoding Delta3, FTHMA-070, Tango85, Tango77, SPOIL, NEOKINE, Tango129 or A259 or can be introduced on a separate vector. Cells stably transfected with the introduced nucleic acid can be identified by drug selection (e.g., cells that have incorporated the selectable marker gene will survive, while the other cells die).

[0668] In another embodiment, the expression characteristics of an endogenous (e.g., Delta3) nucleic acid within a cell, cell line or microorganism may be modified by inserting a DNA regulatory element heterologous to the endogenous gene of interest into the genome of a cell, stable cell line or cloned microorganism such that the inserted regulatory element is operatively linked with the endogenous gene (e.g., Delta3) and controls, modulates or activates the endogenous gene. For example, endogenous Delta3 which is normally “transcriptionally silent”, i.e., Delta3 which is normally not expressed, or is expressed only at very low levels in a cell line or microorganism, may be activated by inserting a regulatory element which is capable of promoting the expression of a normally expressed gene product in that cell line or microorganism. Alternatively, transcriptionally silent, endogenous Delta3 may be activated by insertion of a promiscuous regulatory element that works across cell types.

[0669] A heterologous regulatory element may be inserted into a stable cell line or cloned microorganism, such that it is operatively linked with and activates expression of endogenous Delta3, using techniques, such as targeted homologous recombination, which are well known to those of skill in the art, and described e.g., in Chappel, U.S. Pat. No. 5,272,071, incorporated herein by reference in its entirety; PCT publication NO: WO 91/06667, published May 16, 1991.

[0670] A host cell of the invention, such as a prokaryotic or eukaryotic host cell in culture, can be used to produce (i.e., express) Delta3, FTHMA-070, Tango85, Tango77, SPOIL, NEOKINE, Tango129 or A259 protein. Accordingly, the invention further provides methods for producing Delta3, FTHMA-070, Tango85, Tango77, SPOIL, NEOKINE, Tango129 or A259 protein using the host cells of the invention. In one embodiment, the method comprises culturing the host cell of invention (into which a recombinant expression vector encoding Delta3, FTHMA-070, Tango85, Tango77, SPOIL, NEOKINE, Tango129 or A259 has been introduced) in a suitable medium such that Delta3, FTHMA-070, Tango85, Tango77, SPOIL, NEOKINE, Tango129 or A259 protein is produced. In another embodiment, the method further comprises isolating Delta3, FTHMA-070, Tango85, Tango77, SPOIL, NEOKINE, Tango129 or A259 from the medium or the host cell.

[0671] The host cells of the invention can also be used to produce nonhuman transgenic animals. For example, in one embodiment, a host cell of the invention is a fertilized oocyte or an embryonic stem cell into which Delta3, FTHMA-070, Tango85, Tango77, SPOIL, NEOKINE, Tango129 or A259-coding sequences have been introduced. Such host cells can then be used to create non-human transgenic animals in which exogenous Delta3, FTHMA-070, Tango85, Tango77, SPOIL, NEOKINE, Tango129 or A259 sequences have been introduced into their genome or homologous recombinant animals in which endogenous Delta3, FTHMA-070, Tango85, Tango77, SPOIL, NEOKINE, Tango129 or A259 sequences have been altered. Such animals are useful for studying the function and/or activity of Delta3, FTHMA-070, Tango85, Tango77, SPOIL, NEOKINE, Tango129 or A259 and for identifying and/or evaluating modulators of FTHMA-070, Tango85, Tango77, SPOIL, NEOKINE, Tango129 or A259 activity. As used herein, a “transgenic animal” is a non-human animal, preferably a mammal, more preferably a rodent such as a rat or mouse, in which one or more of the cells of the animal includes a transgene. Other examples of transgenic animals include non-human primates, sheep, dogs, cows, goats, chickens, amphibians, etc. A transgene is exogenous DNA which is integrated into the genome of a cell from which a transgenic animal develops and which remains in the genome of the mature animal, thereby directing the expression of an encoded gene product in one or more cell types or tissues of the transgenic animal. As used herein, an “homologous recombinant animal” is a non-human animal, preferably a mammal, more preferably a mouse, in which an endogenous Delta3, FTHMA-070, Tango85, Tango77, SPOIL, NEOKINE, Tango129 or A259 gene has been altered by homologous recombination between the endogenous gene and an exogenous DNA molecule introduced into a cell of the animal, e.g., an embryonic cell of the animal, prior to development of the animal.

[0672] A transgenic animal of the invention can be created by introducing Delta3, FTHMA-070, Tango85, Tango77, SPOIL, NEOKINE, Tango129 or A259-encoding nucleic acid into the male pronuclei of a fertilized oocyte, e.g., by microinjection, retroviral infection, and allowing the oocyte to develop in a pseudopregnant female foster animal. The Delta3, FTHMA-070, T85 or A259 cDNA sequence can be introduced as a transgene into the genome of a non-human animal. The Tango-77 cDNA sequence e.g., that of (SEQ ID NO:71, SEQ ID NO:73, SEQ ID NO:76; SEQ ID NO:80 or the cDNA of ATCC 98807) can be introduced as a transgene into the genome of a non-human animal. The human SPOIL cDNA sequence of SEQ ID NO:101, SEQ ID NO:104, the DNA insert of the plasmid deposited with ATCC as Accession Number 98883, or the DNA insert of the plasmid deposited with ATCC as Accession Number 98984, can be introduced as a transgene into the genome of a non-human animal. The NEOKINE-1 cDNA sequence of SEQ ID NO:115 can be introduced as a transgene into the genome of a non-human animal. Alternatively, a nonhuman homologue of a human NEOKINE-1 gene, such as a mouse NEOKINE-1 gene (SEQ ID NO:118), a rat NEOKINE-1 gene (SEQ ID NO:121), or a macaque NEOKINE cDNA (SEQ ID NO:124), can be used as a transgene. The T129 cDNA sequence e.g., that of (SEQ ID NO:137 or SEQ ID NO:139) can be introduced as a transgene into the genome of a non-human animal.

[0673] Alternatively, a nonhuman homologue of the human Delta3, FTHMA-070, Tango85, Tango77, SPOIL, NEOKINE, Tango129 or A259 gene, such as a mouse Delta3, FTHMA-070, Tango85, Tango77, SPOIL, NEOKINE, Tango129 or A259 gene, can be isolated based on hybridization to the human Delta3, FTHMA-070, Tango85, Tango77, SPOIL, NEOKINE, Tango129 or A259 cDNA and used as a transgene. Intronic sequences and polyadenylation signals can also be included in the transgene to increase the efficiency of expression of the transgene. A tissue-specific regulatory sequence(s) can be operably linked to the Delta3, FTHMA-070, Tango85, Tango77, SPOIL, NEOKINE, Tango129 or A259 transgene to direct expression of Delta3, FTHMA-070, Tango85, Tango77, SPOIL, NEOKINE, Tango129 or A259 protein to particular cells. Methods for generating transgenic animals via embryo manipulation and microinjection, particularly animals such as mice, have become conventional in the art and are described, for example, in U.S. Pat. Nos. 4,736,866 and 4,870,009, U.S. Pat. No. 4,873,191 and in Hogan, Manipulating the Mouse Embryo, (Cold Spring Harbor Laboratory Press, Cold Spring Harbor, N.Y., 1986). Similar methods are used for production of other transgenic animals. A transgenic founder animal can be identified based upon the presence of the Delta3, FTHMA-070, Tango85, Tango77, SPOIL, NEOKINE, Tango129 or A259 transgene in its genome and/or expression of Delta3, FTHMA-070, Tango85, Tango77, SPOIL, NEOKINE, Tango129 or A259 mRNA in tissues or cells of the animals. A transgenic founder animal can then be used to breed additional animals carrying the transgene. Moreover, transgenic animals carrying a transgene encoding Delta3, FTHMA-070, Tango85, Tango77, SPOIL, NEOKINE, Tango129 or A259 can further be bred to other transgenic animals carrying other transgenes.

[0674] To create an homologous recombinant animal, a vector is prepared which contains at least a portion of a Delta3, FTHMA-070, Tango85, Tango77, SPOIL, NEOKINE, Tango129 or A259 gene (e.g., a human or a non-human homolog of the Delta3, FTHMA-070, Tango85, Tango77, SPOIL, NEOKINE, Tango129 or A259 gene, e.g., a murine Delta3, FTHMA-070, Tango85, Tango77, SPOIL, NEOKINE, Tango129 or A259 gene) into which a deletion, addition or substitution has been introduced to thereby alter, e.g., functionally disrupt, the Delta3, FTHMA-070, Tango85, Tango77, SPOIL, NEOKINE, Tango129 or A259 gene. In a preferred embodiment, the vector is designed such that, upon homologous recombination, the endogenous Delta3, FTHMA-070, Tango85, Tango77, SPOIL, NEOKINE, Tango129 or A259 gene is functionally disrupted (i.e., no longer encodes a functional protein; also referred to as a “knock out” vector). Alternatively, the vector can be designed such that, upon homologous recombination, the endogenous Delta3, FTHMA-070, Tango85, Tango77, SPOIL, NEOKINE, Tango129 or A259 gene is mutated or otherwise altered but still encodes functional protein (e.g., the upstream regulatory region can be altered to thereby alter the expression of the endogenous Delta3, FTHMA-070, Tango85, Tango77, SPOIL, NEOKINE, Tango129 or A259 protein). In the homologous recombination vector, the altered portion of the Delta3, FTHMA-070, Tango85, Tango77, SPOIL, NEOKINE, Tango129 or A259 gene is flanked at its 5′ and 3′ ends by additional nucleic acid of the Delta3, FTHMA-070, Tango85, Tango77, SPOIL, NEOKINE, Tango129 or A259 gene to allow for homologous recombination to occur between the exogenous Delta3, FTHMA-070, Tango85, Tango77, SPOIL, NEOKINE, Tango129 or A259 gene carried by the vector and an endogenous Delta3, FTHMA-070, Tango85, Tango77, SPOIL, NEOKINE, Tango129 or A259 gene in an embryonic stem cell. The additional flanking Delta3, FTHMA-070, Tango85, Tango77, SPOIL, NEOKINE, Tango129 or A259 nucleic acid is of sufficient length for successful homologous recombination with the endogenous gene. Typically, several kilobases of flanking DNA (both at the 5′ and 3′ ends) are included in the vector (see e.g., Thomas and Capecchi (1987) Cell 51:503 for a description of homologous recombination vectors). The vector is introduced into an embryonic stem cell line (e.g., by electroporation) and cells in which the introduced Delta3, FTHMA-070, Tango85, Tango77, SPOIL, NEOKINE, Tango129 or A259 gene has homologously recombined with the endogenous Delta3, FTHMA-070, Tango85, Tango77, SPOIL, NEOKINE, Tango129 or A259 gene are selected (see e.g., Li et al. (1992) Cell 69:915). The selected cells are then injected into a blastocyst of an animal (e.g., a mouse) to form aggregation chimeras (see, e.g., Bradley in Teratocarcinomas and Embryonic Stem Cells: A Practical Approach, Robertson, ed. (IRL, Oxford, 1987) pp. 113-152). A chimeric embryo can then be implanted into a suitable pseudopregnant female foster animal and the embryo brought to term. Progeny harboring the homologously recombined DNA in their germ cells can be used to breed animals in which all cells of the animal contain the homologously recombined DNA by germline transmission of the transgene. Methods for constructing homologous recombination vectors and homologous recombinant animals are described further in Bradley (1991) Current Opinion in Bio/Technology 2:823-829 and in PCT Publication Nos. WO 90/11354, WO 91/01140, WO 92/0968, and WO 93/04169.

[0675] In another embodiment, transgenic non-humans animals can be produced which contain selected systems which allow for regulated expression of the transgene. One example of such a system is the cre/loxP recombinase system of bacteriophage P1. For a description of the cre/loxP recombinase system, see, e.g., Lakso et al. (1992) Proc. Natl. Acad. Sci. USA 89:6232-6236. Another example of a recombinase system is the FLP recombinase system of Saccharomyces cerevisiae (O'Gorman et al. (1991) Science 251:1351-1355. If a cre/loxP recombinase system is used to regulate expression of the transgene, animals containing transgenes encoding both the Cre recombinase and a selected protein are required. Such animals can be provided through the construction of “double” transgenic animals, e.g., by mating two transgenic animals, one containing a transgene encoding a selected protein and the other containing a transgene encoding a recombinase.

[0676] Clones of the non-human transgenic animals described herein can also be produced according to the methods described in Wilmut et al. (1997) Nature 385:810-813 and PCT Publication Nos. WO 97/07668 and WO 97/07669. In brief, a cell, e.g., a somatic cell, from the transgenic animal can be isolated and induced to exit the growth cycle and enter Gₒ phase. The quiescent cell can then be fused, e.g., through the use of electrical pulses, to an enucleated oocyte from an animal of the same species from which the quiescent cell is isolated. The reconstructed oocyte is then cultured such that it develops to morula or blastocyte and then transferred to pseudopregnant female foster animal. The offspring borne of this female foster animal will be a clone of the animal from which the cell, e.g., the somatic cell, is isolated.

### Delta3 Peptides of the Present Invention

[0677] The present invention also makes available Delta3 polypeptides which are isolated from, or otherwise substantially free of other cellular proteins, especially other signal transduction factors and/or transcription factors which may normally be associated with the Delta3 polypeptide. In general, polypeptides of the invention exhibit an activity of a Delta3 protein. The invention provides various forms of Delta3 proteins, specifically including all of the Delta3 proteins encoded by a nucleic acid of the invention, as described above.

[0678] In one embodiment, a polypeptide of the invention is a polypeptide that is a variant of a polypeptide of the invention can be assayed for: (1) the ability to form protein:protein interactions with proteins in a signaling pathway of the polypeptide of the invention; (2) the ability to bind a ligand of the polypeptide of the invention; or (3) the ability to bind to an intracellular target protein of the polypeptide of the invention. In yet another preferred embodiment, the mutant polypeptide can be assayed for the ability to modulate cellular proliferation, cellular migration or chemotaxis, or cellular differentiation.

[0679] Full-length proteins or fragments corresponding to one or more particular motifs and/or domains or to arbitrary sizes, for example, at least about 5, 10, 25, 50, 75, 100, 125, 150 amino acids in length are within the scope of the present invention. The invention encompasses all proteins encoded by the nucleic acids described in the above section describing the nucleic acids of the invention.

[0680] For example, isolated Delta3 polypeptides can include all or a portion of an amino acid sequences corresponding to a Delta3 polypeptide represented in SEQ ID NOs: 2, 25, 28, 30, 32, 34, 36, 38, 40, 42, 44 or 46, or the amino acid sequence encoded by the cDNA of a clone deposited with the ATCC® as Accession Number 98348. Isolated portions of Delta3 proteins can be obtained, for example, by screening peptides recombinantly produced from the corresponding fragment of the nucleic acid encoding such peptides. In addition, fragments can be chemically synthesized using techniques known in the art such as conventional Merrifield solid phase f-Moc or t-Boc chemistry. For example, a Delta3 polypeptide of the present invention may be divided into fragments of desired length with no overlap of the fragments, or preferably divided into overlapping fragments of a desired length. The fragments can be produced (recombinantly or by chemical synthesis) and tested to identify those peptidyl fragments which can function as either agonists or antagonists of a wild-type (e.g., “authentic”) Delta3 protein.

[0681] In one embodiment, the Delta3 polypeptide of the invention has an overall amino acid sequence similarity or identity of at least about 70%, at least about 75%, at least about 80%, at least about 85%, at least about 90%, at least about 95%, at least about 98%, or at least about 99% with the amino acid sequenceSEQ ID NOs: 2, 25, 28, 30, 32, 34, 36, 38, 40, 42, 44 or 46, or the amino acid sequence encoded by the cDNA of a clone deposited with the ATCC® as Accession Number 98348.

[0682] In a particularly preferred embodiment a Delta3 protein has the amino acid sequence SEQ ID NOs: 2, 25, 28, 30, 32, 34, 36, 38, 40, 42, 44 or 46, or the amino acid sequence of the cDNA of a clone deposited with the ATCC® as Accession Number 98348. In other particularly preferred embodiments, the Delta3 protein has a Delta3 activity.

[0683] The present invention further pertains to forms of one of the subject Delta3 polypeptides which are encoded by nucleotide sequences derived from a mammalian organism, and which have amino acid sequences evolutionarily related to the Delta3 protein represented in SEQ ID NOs: 2, 25, 28, 30, 32, 34, 36, 38, 40, 42, 44 or 46, or the amino acid sequence encoded by the cDNA of a clone deposited with the ATCC® as Accession Number 98348. Such recombinant Delta3 polypeptides can, in certain embodiments, preferably are capable of functioning in one of either role of an agonist or antagonist of at least one biological activity of a wild-type (“authentic”) Delta3 protein of the appended sequence listing. The term “evolutionarily related to”, with respect to amino acid sequences of human Delta3 proteins, refers to both polypeptides having amino acid sequences which have arisen naturally, and also to mutational variants of the Delta3 polypeptides which are derived, for example, by combinatorial mutagenesis. Such evolutionarily derived Delta3 polypeptides preferred by the present invention have a Delta3 activity and are at least 80% homologous and more preferably 85% identical and most preferably 90% identical with the amino acid sequence of SEQ ID NOs: 2, 25, 28, 30, 32, 34, 36, 38, 40, 42, 44 or 46, or the amino acid sequence encoded by the cDNA of a clone deposited with the ATCC® as Accession Number 98348. In a particularly preferred embodiment, a Delta3 protein comprises the amino acid coding sequence of SEQ ID NOs: 2, 25, 28, 30, 32, 34, 36, 38, 40, 42, 44 or 46, or the amino acid sequence of the cDNA of a clone deposited with the ATCC® as Accession Number 98348.

[0684] The present invention further pertains to methods of producing the subject Delta3 polypeptides. For example, a host cell transfected with a nucleic acid vector directing expression of a nucleotide sequence encoding the subject polypeptides can be cultured under appropriate conditions to allow expression of the peptide to occur. The cells may be harvested, lysed and the protein isolated. A cell culture includes host cells, media and other byproducts. Suitable media for cell culture are well known in the art. The recombinant Delta3 polypeptide can be isolated from cell culture medium, host cells, or both using techniques known in the art for purifying proteins including ion-exchange chromatography, gel filtration chromatography, ultrafiltration, electrophoresis, and immunoaffinity purification with antibodies specific for such peptide. In a preferred embodiment, the recombinant Delta3 polypeptide is a fusion protein containing a domain which facilitates its purification, such as GST fusion protein or poly(His) fusion protein.

[0685] Moreover, it will be generally appreciated that, under certain circumstances, it may be advantageous to provide variants of one of the subject Delta3 polypeptides which function in a limited capacity as one of either a Delta3 agonist (mimetic) or a Delta3 antagonist, in order to promote or inhibit only a subset of the biological activities of the naturally-occurring form of the protein. Thus, specific biological effects can be elicited by treatment with a variant having a limited function, and with fewer side effects relative to treatment with agonists or antagonists which are directed to all of the biological activities of naturally-occurring forms of Delta3 proteins.

[0686] Variants and/or mutants of each of the subject Delta3 proteins can be generated by mutagenesis, such as by discrete point mutation(s), or by truncation. For instance, mutation can give rise to homologs which retain substantially the same, or merely a subset, of the biological activity of the Delta3 polypeptide from which it was derived. Alternatively, antagonistic forms of the protein can be generated which are able to inhibit the function of the naturally-occurring form of the protein, such as by competitively binding to a downstream or upstream member of the Delta3 cascade which includes the Delta3 protein. In addition, agonistic forms of the protein may be generated which are constitutively active.

[0687] The recombinant Delta3 polypeptides of the present invention also include homologs of the authentic Delta3 proteins, such as versions of those protein which are resistant to proteolytic cleavage, as for example, due to mutations which alter ubiquitination or other enzymatic targeting associated with the protein.

[0688] Delta3 polypeptides may also be chemically modified to create Delta3 derivatives by forming covalent or aggregate conjugates with other chemical moieties, such as glycosyl groups, lipids, phosphate, acetyl groups and the like. Covalent derivatives of Delta3 proteins can be prepared by linking the chemical moieties to functional groups on amino acid sidechains of the protein or at the N-terminus or at the C-terminus of the polypeptide.

[0689] Modification of the structure of the subject Delta3 polypeptides can be for such purposes as enhancing therapeutic or prophylactic efficacy, stability (e.g., ex vivo shelf life and resistance to proteolytic degradation in vivo), or post-translational modifications (e.g., to alter phosphorylation pattern of protein). Such modified peptides, when designed to retain at least one activity of the naturally-occurring form of the protein, or to produce specific antagonists thereof, are considered functional equivalents of the Delta3 polypeptides described in more detail herein. Such modified peptides can be produced, for instance, by amino acid substitution, deletion, or addition.

[0690] For example, it is reasonable to expect that an isolated replacement of a leucine with an isoleucine or valine, an aspartate with a glutamate, a threonine with a serine, or a similar replacement of an amino acid with a structurally related amino acid (i.e. isosteric and/or isoelectric mutations) will not have a major effect on the biological activity of the resulting molecule. Conservative replacements are those that take place within a family of amino acids that are related in their side chains. Genetically encoded amino acids are can be divided into four families: (1) acidic=aspartate, glutamate; (2) basic=lysine, arginine, histidine; (3) nonpolar=alanine, valine, leucine, isoleucine, proline, phenylalanine, methionine, tryptophan; and (4) uncharged polar=glycine, asparagine, glutamine, cysteine, serine, threonine, tyrosine. In similar fashion, the amino acid repertoire can be grouped as (1) acidic=aspartate, glutamate; (2) basic=lysine, arginine histidine, (3) aliphatic=glycine, alanine, valine, leucine, isoleucine, serine, threonine, with serine and threonine optionally be grouped separately as aliphatic-hydroxyl; (4) aromatic=phenylalanine, tyrosine, tryptophan; (5) amide=asparagine, glutamine; and (6) sulfur-containing=cysteine and methionine. (See, for example, Biochemistry, 4th ed., Ed. by L. Stryer, WH Freeman and Co.: 1995). Whether a change in the amino acid sequence of a peptide results in a functional Delta3 homolog (e.g., functional in the sense that the resulting polypeptide mimics or antagonizes the wild-type form) can be readily determined by assessing the ability of the variant peptide to produce a response in cells in a fashion similar to the wild-type protein, or competitively inhibit such a response. Polypeptides in which more than one replacement has taken place can readily be tested in the same manner.

[0691] This invention further contemplates a method for generating sets of combinatorial mutants of the subject Delta3 proteins as well as truncation mutants, and is especially useful for identifying potential functional variant sequences (e.g., homologs). The purpose of screening such combinatorial libraries is to generate, for example, novel Delta3 homologs which can act as either agonists or antagonist, or alternatively, possess novel activities all together.

[0692] In one embodiment, the variegated library of Delta3 variants is generated by combinatorial mutagenesis at the nucleic acid level, and is encoded by a variegated gene library. For instance, a mixture of synthetic oligonucleotides can be enzymatically ligated into gene sequences such that the degenerate set of potential Delta3 sequences are expressible as individual polypeptides, or alternatively, as a set of larger fusion proteins (e.g., for phage display) containing the set of Delta3 sequences therein.

[0693] There are many ways by which such libraries of potential Delta3 variants can be generated from a degenerate oligonucleotide sequence. Chemical synthesis of a degenerate gene sequence can be carried out in an automatic DNA synthesizer, and the synthetic genes then ligated into an appropriate expression vector. The purpose of a degenerate set of genes is to provide, in one mixture, all of the sequences encoding the desired set of potential Delta3 sequences. The synthesis of degenerate oligonucleotides is well known in the art (see for example, Narang, S A (1983) Tetrahedron 39:3; Itakura et al. (1981) Recombinant DNA, Proc. 3rd Cleveland Sympos. Macromolecules, ed. AG Walton, Amsterdam: Elsevier ppg. 273-289; Itakura et al. (1984) Annu. Rev. Biochem. 53:323; Itakura et al. (1984) Science 198:1056; Ike et al. (1983) Nucleic Acid Res. 11:477. Such techniques have been employed in the directed evolution of other proteins (see, for example, Scott et al. (1990) Science 249:386-390; Roberts et al. (1992) PNAS 89:2429-2433; Devlin et al. (1990) Science 249: 404-406; Cwirla et al. (1990) PNAS 87: 6378-6382; as well as U.S. Pat. Nos. 5,223,409, 5,198,346, and 5,096,815).

[0694] Likewise, a library of coding sequence fragments can be provided for a Delta3 clone in order to generate a variegated population of Delta3 fragments for screening and subsequent selection of bioactive fragments. A variety of techniques are known in the art for generating such libraries, including chemical synthesis. In one embodiment, a library of coding sequence fragments can be generated by (i) treating a double stranded PCR fragment of a Delta3 coding sequence with a nuclease under conditions wherein nicking occurs only about once per molecule; (ii) denaturing the double stranded DNA; (iii) renaturing the DNA to form double stranded DNA which can include sense/antisense pairs from different nicked products; (iv) removing single stranded portions from reformed duplexes by treatment with S1 nuclease; and (v) ligating the resulting fragment library into an expression vector. By this exemplary method, an expression library can be derived which codes for N-terminal, C-terminal and internal fragments of various sizes.

[0695] A wide range of techniques are known in the art for screening gene products of combinatorial libraries made by point mutations or truncation, and for screening cDNA libraries for gene products having a certain property. Such techniques will be generally adaptable for rapid screening of the gene libraries generated by the combinatorial mutagenesis of Delta3 homologs. The most widely used techniques for screening large gene libraries typically comprises cloning the gene library into replicable expression vectors, transforming appropriate cells with the resulting library of vectors, and expressing the combinatorial genes under conditions in which detection of a desired activity facilitates relatively easy isolation of the vector encoding the gene whose product was detected. Each of the illustrative assays described below are amenable to high through-put analysis as necessary to screen large numbers of degenerate Delta3 sequences created by combinatorial mutagenesis techniques.

[0696] Combinatorial mutagenesis has a potential to generate very large libraries of mutant proteins, e.g., in the order of 1026 molecules. Combinatorial libraries of this size may be technically challenging to screen even with high throughput screening assays. To overcome this problem, a new technique has been developed recently, recrusive ensemble mutagenesis (REM), which allows one to avoid the very high proportion of non-functional proteins in a random library and simply enhances the frequency of functional proteins, thus decreasing the complexity required to achieve a useful sampling of sequence space. REM is an algorithm which enhances the frequency of functional mutants in a library when an appropriate selection or screening method is employed (Arkin and Yourvan, 1992, PNAS USA 89:7811-7815; Yourvan et al., 1992, Parallel Problem Solving from Nature, 2., In Maenner and Manderick, eds., Elsevir Publishing Co., Amsterdam, pp. 401-410; Delgrave et al., 1993, Protein Engineering 6(3):327-331).

[0697] The invention also provides for reduction of the Delta3 proteins to generate mimetics, e.g., peptide or non-peptide agents, which are able to bind to a Delta3 protein and/or to disrupt binding of a Delta3 polypeptide of the present invention with either upstream or downstream components of a Delta/Notch signaling cascade, such as binding proteins or interactors. Thus, such mutagenic techniques as described above are also useful to map the determinants of the Delta3 proteins which participate in protein-protein interactions involved in, for example, binding of the subject Delta3 polypeptide to proteins which may function upstream (including both activators and repressors of its activity) or to proteins or nucleic acids which may function downstream of the Delta3 polypeptide, whether they are positively or negatively regulated by it, for example, Notch. To illustrate, the critical residues of a subject Delta3 polypeptide which are involved in molecular recognition of, for example, the Notch gene product or other component upstream or downstream of a Delta3 gene can be determined and used to generate Delta-derived peptidomimetics which competitively inhibit binding of the authentic Delta3 protein with that moiety. By employing, for example, scanning mutagenesis to map the amino acid residues of each of the subject Delta3 proteins which are involved in binding other extracellular proteins, peptidomimetic compounds can be generated which mimic those residues of the Delta3 protein which facilitate the interaction. Such mimetics may then be used to interfere with the normal function of a Delta3 protein. For instance, non-hydrolyzable peptide analogs of such residues can be generated using benzodiazepine (e.g., see Freidinger et al. in Peptides: Chemistry and Biology, G.R. Marshall ed., ESCOM Publisher: Leiden, Netherlands, 1988), azepine (e.g., see Huffman et al. in Peptides: Chemistry and Biology, G.R. Marshall ed., ESCOM Publisher: Leiden, Netherlands, 1988), substituted gamma lactam rings (Garvey et al. in Peptides: Chemistry and Biology, G.R. Marshall ed., ESCOM Publisher: Leiden, Netherlands, 1988), keto-methylene pseudopeptides (Ewenson et al. (1986) J Med Chem 29:295; and Ewenson et al. in Peptides: Structure and Function (Proceedings of the 9th American Peptide Symposium) Pierce Chemical Co. Rockland, Ill., 1985), b-turn dipeptide cores (Nagai et al. (1985) Tetrahedron Lett 26:647; and Sato et al. (1986) J Chem Soc Perkin Trans 1:1231), and b-aminoalcohols (Gordon et al. (1985) Biochem Biophys Res Commun126:419; and Dann et al. (1986) Biochem Biophys Res Commun 134:71).

### Delta3 Fusion Proteins and Immunogens.

[0698] In another embodiment, the coding sequences for the polypeptide can be incorporated as a part of a fusion gene including a nucleotide sequence encoding a different polypeptide.

[0699] In one embodiment, the Delta3 polypeptide is a Delta3-Ig polypeptide. The Delta3-Ig polypeptide can comprise the entire extracellular domain of Delta3, e.g., human Delta3, or a variant thereof. For example, a Delta3-Ig polypeptide can comprise an amino acid sequences from about amino acid 1 to about amino acid 529 of SEQ ID NO: 2 or from about amino acid 1 to about amino acid 530 of SEQ ID NO: 25. Other preferred Delta3-Ig proteins do not comprise a signal peptide and thus, preferably do not comprise about amino acid 1 to about amino acid 17 or amino acid 18 of SEQ ID NO: 2 or 25. Alternatively, a Delta3-Ig fusion protein can comprise a portion of the extracellular domain of a Delta3 protein or a variant of a portion of the extracellular domain of a Delta3 protein. Preferred portions of the extracellular domain include portions having at least one motif amino terminal to the transmembrane domain. For example a Delta3-Ig fusion protein can comprise at least one EGF-like domain. A Delta3-Ig fusion protein can further comprise a DSL domain. A Delta3-Ig fusion protein can also further comprise a signal peptide. Delta3-Ig fusion proteins can be prepared as described, e.g., in U.S. Pat. No. 5,434,131.

[0700] This type of expression system can be useful under conditions where it is desirable to produce an immunogenic fragment of a Delta3 protein. For example, the VP6 capsid protein of rotavirus can be used as an immunologic carrier protein for portions of the Delta3 polypeptide, either in the monomeric form or in the form of a viral particle. The nucleic acid sequences corresponding to the portion of a subject Delta3 protein to which antibodies are to be raised can be incorporated into a fusion gene construct which includes coding sequences for a late vaccinia virus structural protein to produce a set of recombinant viruses expressing fusion proteins comprising Delta3 epitopes as part of the virion. It has been demonstrated with the use of immunogenic fusion proteins utilizing the Hepatitis B surface antigen fusion proteins that recombinant Hepatitis B virions can be utilized in this role as well. Similarly, chimeric constructs coding for fusion proteins containing a portion of a Delta3 protein and the poliovirus capsid protein can be created to enhance immunogenicity of the set of polypeptide antigens (see, for example, EP Publication No: 0259149; and Evans et al. (1989) Nature 339:385; Huang et al. (1988) J. Virol. 62:3855; and Schlienger et al. (1992) J. Virol. 66:2).

[0701] The Multiple Antigen Peptide system for peptide-based immunization can also be utilized to generate an immunogen, wherein a desired portion of a Delta3 polypeptide is obtained directly from organo-chemical synthesis of the peptide onto an oligomeric branching lysine core (see, for example, Posnett et al. (1988) J. Biol. Chem. 263:1719 and Nardelli et al. (1992) J. Immunol. 148:914). Antigenic determinants of Delta3 proteins can also be expressed and presented by bacterial cells.

[0702] In addition to utilizing fusion proteins to enhance immunogenicity, it is widely appreciated that fusion proteins can also facilitate the expression of proteins, and accordingly, can be used in the expression of the Delta3 polypeptides of the present invention. For example, Delta3 polypeptides can be generated as glutathione-S-transferase (GST-fusion) proteins. Such GST-fusion proteins can enable easy purification of the Delta3 polypeptide, as for example by the use of glutathione-derivatized matrices (see, for example, Current Protocols in Molecular Biology, eds. Ausubel et al. (N.Y.: John Wiley & Sons, 1991)).

[0703] In another embodiment, a fusion gene coding for a purification leader sequence, such as a poly-(His)/enterokinase cleavage site sequence at the N-terminus of the desired portion of the recombinant protein, can allow purification of the expressed fusion protein by affinity chromatography using a Ni²⁺ metal resin. The purification leader sequence can then be subsequently removed by treatment with enterokinase to provide the purified protein (e.g., see Hochuli et al. (1987) J. Chromatography 411:177; and Janknecht et al. Proc. Natl. Acad. Sci. USA 88:8972). Techniques for making fusion genes are known to those skilled in the art. Essentially, the joining of various DNA fragments coding for different polypeptide sequences is performed in accordance with conventional techniques, employing blunt-ended or stagger-ended termini for ligation, restriction enzyme digestion to provide for appropriate termini, filling-in of cohesive ends as appropriate, alkaline phosphatase treatment to avoid undesirable joining, and enzymatic ligation. In another embodiment, the fusion gene can be synthesized by conventional techniques including automated DNA synthesizers. Alternatively, PCR amplification of gene fragments can be carried out using anchor primers which give rise to complementary overhangs between two consecutive gene fragments which can subsequently be annealed to generate a chimeric gene sequence (see, for example, Current Protocols in Molecular Biology, eds. Ausubel et al. John Wiley & Sons: 1992).

### Delta3 Antibodies

[0704] Another aspect of the invention pertains to an antibody that binds to a Delta3 protein; that is, to antibodies directed against a polypeptide of the invention. For example, by using immunogens derived from a Delta3 protein, e.g., based on the cDNA sequences, anti-protein/anti-peptide antisera or monoclonal antibodies can be made by standard protocols (See, for example, Antibodies: A Laboratory Manual ed. by Harlow and Lane (Cold Spring Harbor Press: 1988)). A mammal, such as a mouse, a hamster or rabbit can be immunized with an immunogenic form of the peptide (e.g., a Delta3 polypeptide or an antigenic fragment which is capable of eliciting an antibody response, or a fusion protein as described above). Techniques for conferring immunogenicity on a protein or peptide include conjugation to carriers or other techniques well known in the art. An immunogenic portion of a Delta3 protein can be administered in the presence of adjuvant. The progress of immunization can be monitored by detection of antibody titers in plasma or serum. Standard ELISA or other immunoassays can be used with the immunogen as antigen to assess the levels of antibodies.

[0705] Following immunization of an animal with an antigenic preparation of a Delta3 polypeptide, anti-Delta3 antisera can be obtained and, if desired, polyclonal anti-Delta3 antibodies isolated from the serum. To produce monoclonal antibodies, antibody-producing cells (lymphocytes) can be harvested from an immunized animal and fused by standard somatic cell fusion procedures with immortalizing cells such as myeloma cells to yield hybridoma cells. Such techniques are well known in the art, and include, for example, the hybridoma technique (originally developed by Kohler and Milstein, (1975) Nature, 256: 495-497), the human B cell hybridoma technique (Kozbar et al., (1983) Immunology Today, 4: 72), and the EBV-hybridoma technique to produce human monoclonal antibodies (Cole et al., (1985) Monoclonal Antibodies and Cancer Therapy, Alan R. Liss, Inc. pp. 77-96). Hybridoma cells can be screened immunochemically for production of antibodies specifically reactive with a Delta3 polypeptide of the present invention and monoclonal antibodies isolated from a culture comprising such hybridoma cells. In one embodiment anti-human Delta3 antibodies specifically react with the proteins encoded by the DNA of ATCC® Deposit Accession Number 98348.

[0706] Antibodies can be fragmented using conventional techniques and the fragments screened for utility in the same manner as described above for whole antibodies. For example, F(ab)₂ fragments can be generated by treating antibody with pepsin. The resulting F(ab)₂ fragment can be treated to reduce disulfide bridges to produce Fab fragments. The antibody of the present invention is further intended to include bispecific and chimeric molecules having affinity for a Delta3 protein conferred by at least one CDR region of the antibody.

[0707] Antibodies which specifically bind Delta3 epitopes can also be used in immunohistochemical staining of tissue samples in order to evaluate the abundance and pattern of expression of each of the subject Delta3 polypeptides. Anti-Delta3 antibodies can be used diagnostically in immuno-precipitation and immuno-blotting to detect and evaluate Delta3 protein levels in tissue as part of a clinical testing procedure. For instance, such measurements can be useful in predictive valuations of the onset or progression of neurodegenerative, neoplastic or hyperplastic disorders. Likewise, the ability to monitor Delta3 protein levels in an individual can allow determination of the efficacy of a given treatment regimen for an individual afflicted with such a disorder. The level of Delta3 polypeptides may be measured from cells in bodily fluid, such as in samples of cerebral spinal fluid or amniotic fluid, or can be measured in tissue, such as produced by biopsy. Diagnostic assays using anti-Delta3 antibodies can include, for example, immunoassays designed to aid in early diagnosis of a neurodegenerative disorder, particularly ones which are manifest at birth. Diagnostic assays using anti-Delta3 polypeptide antibodies can also include immunoassays designed to aid in early diagnosis and phenotyping neurodegenerative, neoplastic or hyperplastic disorders.

[0708] Another application of anti-Delta3 antibodies of the present invention is in the immunological screening of cDNA libraries constructed in expression vectors such as λgt11, λgt18-23, λZAP, and ORF8. Messenger libraries of this type, having coding sequences inserted in the correct reading frame and orientation, can produce fusion proteins. For instance, λgt11 will produce fusion proteins whose amino termini consist of B-galactosidase amino acid sequences and whose carboxy termini consist of a foreign polypeptide. Antigenic epitopes of a Delta3 protein, e.g., other orthologs of a particular Delta3 protein or other paralogs from the same species, can then be detected with antibodies, as, for example, reacting nitrocellulose filters lifted from infected plates with anti-Delta3 antibodies. Positive phage detected by this assay can then be isolated from the infected plate. Thus, the presence of Delta3 homologs can be detected and cloned from other animals, as can alternate isoforms (including splicing variants) from humans.

[0709] Polyclonal antibodies can be prepared as described above by immunizing a suitable subject with a polypeptide of the invention as an immunogen. Preferred polyclonal antibody compositions are ones that have been selected for antibodies directed against a polypeptide or polypeptides of the invention. Particularly preferred polyclonal antibody preparations are ones that contain only antibodies directed against a polypeptide or polypeptides of the invention. Particularly preferred immunogen compositions are those that contain no other human proteins such as, for example, immunogen compositions made using a non-human host cell for recombinant expression of a polypeptide of the invention. In such a manner, the only human epitope or epitopes recognized by the resulting antibody compositions raised against this immunogen will be present as part of a polypeptide or polypeptides of the invention.

[0710] The antibody titer in the immunized subject can be monitored over time by standard techniques, such as with an enzyme linked immunosorbent assay (ELISA) using immobilized polypeptide. If desired, the antibody molecules can be isolated from the mammal (e.g., from the blood) and further purified by well-known techniques, such as protein A chromatography to obtain the IgG fraction. Alternatively, antibodies specific for a protein or polypeptide of the invention can be selected for (e.g., partially purified) or purified by, e.g., affinity chromatography. For example, a recombinantly expressed and purified (or partially purified) protein of the invention is produced as described herein, and covalently or non-covalently coupled to a solid support such as, for example, a chromatography column. The column can then be used to affinity purify antibodies specific for the proteins of the invention from a sample containing antibodies directed against a large number of different epitopes, thereby generating a substantially purified antibody composition, i.e., one that is substantially free of contaminating antibodies. By a substantially purified antibody composition is meant, in this context, that the antibody sample contains at most only 30% (by dry weight) of contaminating antibodies directed against epitopes other than those on the desired protein or polypeptide of the invention, and preferably at most 20%, yet more preferably at most 10%, and most preferably at most 5% (by dry weight) of the sample is contaminating antibodies. A purified antibody composition means that at least 99% of the antibodies in the composition are directed against the desired protein or polypeptide of the invention.

[0711] At an appropriate time after immunization, e.g., when the specific antibody titers are highest, antibody-producing cells can be obtained from the subject and used to prepare monoclonal antibodies by standard techniques, such as the hybridoma technique originally described by Kohler and Milstein (1975) Nature 256:495-497, the human B cell hybridoma technique (Kozbor et al. (1983) Immunol. Today 4:72), the EBV-hybridoma technique (Cole et al. (1985), Monoclonal Antibodies and Cancer Therapy, Alan R. Liss, Inc., pp. 77-96) or trioma techniques. The technology for producing hybridomas is well known (see generally Current Protocols in Immunology (1994) Coligan et al. (eds.) John Wiley & Sons, Inc., New York, N.Y.). Hybridoma cells producing a monoclonal antibody of the invention are detected by screening the hybridoma culture supernatants for antibodies that bind the polypeptide of interest, e.g., using a standard ELISA assay.

[0712] Alternative to preparing monoclonal antibody-secreting hybridomas, a monoclonal antibody directed against a polypeptide of the invention can be identified and isolated by screening a recombinant combinatorial immunoglobulin library (e.g., an antibody phage display library) with the polypeptide of interest. Kits for generating and screening phage display libraries are commercially available (e.g., the Pharmacia Recombinant Phage Antibody System, Catalog NO: 27-9400-01; and the Stratagene SurfZAP Phage Display Kit, Catalog NO: 240612). Additionally, examples of methods and reagents particularly amenable for use in generating and screening antibody display library can be found in, for example, U.S. Pat. No. 5,223,409; PCT Publication No: WO 92/18619; PCT Publication No: WO 91/17271; PCT Publication No: WO 92/20791; PCT Publication No: WO 92/15679; PCT Publication No: WO 93/01288; PCT Publication No: WO 92/01047; PCT Publication No: WO 92/09690; PCT Publication No: WO 90/02809; Fuchs et al. (1991) Bio/Technology 9:1370-1372; Hay et al. (1992) Hum. Antibod. Hybridomas 3:81-85; Huse et al. (1989) Science 246:1275-1281; Griffiths et al. (1993) EMBO J. 12:725-734.

[0713] Additionally, recombinant antibodies, such as chimeric and humanized monoclonal antibodies, comprising both human and non-human portions, which can be made using standard recombinant DNA techniques, are within the scope of the invention. A chimeric antibody is a molecule in which different portions are derived from different animal species, such as those having a variable region derived from a murine mAb and a human immunoglobulin constant region. (See, e.g., Cabilly et al., U.S. Pat. No. 4,816,567; and Boss et al., U.S. Pat. No. 4,816,397, which are incorporated herein by reference in their entirety.) Humanized antibodies are antibody molecules from non-human species having one or more complementarily determining regions (CDRs) from the non-human species and a framework region from a human immunoglobulin molecule. (See, e.g., Queen, U.S. Pat. No. 5,585,089.) Such chimeric and humanized monoclonal antibodies can be produced by recombinant DNA techniques known in the art, for example using methods described in PCT Publication NO: WO 87/02671; European Patent Application 184,187; European Patent Application 171,496; European Patent Application 173,494; PCT Publication NO: WO 86/01533; U.S. Pat. No. 4,816,567; European Patent Application 125,023; Better et al. (1988) Science 240:1041-1043; Liu et al. (1987) Proc. Natl. Acad. Sci. USA 84:3439-3443; Liu et al. (1987) J. Immunol. 139:3521-3526; Sun et al. (1987) Proc. Natl. Acad. Sci. USA 84:214-218; Nishimura et al. (1987) Canc. Res. 47:999-1005; Wood et al. (1985) Nature 314:446-449; and Shaw et al. (1988) J. Natl. Cancer Inst. 80:1553-1559); Morrison (1985) Science 229:1202-1207; Oi et al. (1986) Bio/Techniques 4:214; U.S. Pat. No. 5,225,539; Jones et al. (1986) Nature 321:552-525; Verhoeyan et al. (1988) Science 239:1534; and Beidler et al. (1988) J. Immunol. 141:4053-4060.

[0714] Completely human antibodies are particularly desirable for therapeutic treatment of human patients. Such antibodies can be produced, for example, using transgenic mice which are incapable of expressing endogenous immunoglobulin heavy and light chains genes, but which can express human heavy and light chain genes. The transgenic mice are immunized in the normal fashion with a selected antigen, e.g., all or a portion of a polypeptide of the invention. Monoclonal antibodies directed against the antigen can be obtained using conventional hybridoma technology. The human immunoglobulin transgenes harbored by the transgenic mice rearrange during B cell differentiation, and subsequently undergo class switching and somatic mutation. Thus, using such a technique, it is possible to produce therapeutically useful IgG, IgA and IgE antibodies. For an overview of this technology for producing human antibodies, see Lonberg and Huszar (1995, Int. Rev. Immunol. 13:65-93). For a detailed discussion of this technology for producing human antibodies and human monoclonal antibodies and protocols for producing such antibodies, see, e.g., U.S. Pat. No. 5,625,126; U.S. Pat. No. 5,633,425; U.S. Pat. No. 5,569,825; U.S. Pat. No. 5,661,016; and U.S. Pat. No. 5,545,806. In addition, companies such as Abgenix, Inc. (Freemont, Calif.), can be engaged to provide human antibodies directed against a selected antigen using technology similar to that described above.

[0715] Completely human antibodies which recognize a selected epitope can be generated using a technique referred to as “guided selection.” In this approach a selected non-human monoclonal antibody, e.g., a murine antibody, is used to guide the selection of a completely human antibody recognizing the same epitope. (Jespers et al. (1994) Bio/technology 12:899-903).

[0716] An antibody directed against a polypeptide of the invention (e.g., monoclonal antibody) can be used to isolate the polypeptide by standard techniques, such as affinity chromatography or immunoprecipitation. Moreover, such an antibody can be used to detect the protein (e.g., in a cellular lysate or cell supernatant) in order to evaluate the abundance and pattern of expression of the polypeptide. The antibodies can also be used diagnostically to monitor protein levels in tissue as part of a clinical testing procedure, e.g., to, for example, determine the efficacy of a given treatment regimen. Detection can be facilitated by coupling the antibody to a detectable substance. Examples of detectable substances include various enzymes, prosthetic groups, fluorescent materials, luminescent materials, bioluminescent materials, and radioactive materials. Examples of suitable enzymes include horseradish peroxidase, alkaline phosphatase, β-galactosidase, or acetylcholinesterase; examples of suitable prosthetic group complexes include streptavidin/biotin and avidin/biotin; examples of suitable fluorescent materials include umbelliferone, fluorescein, fluorescein isothiocyanate, rhodamine, dichlorotriazinylamine fluorescein, dansyl chloride or phycoerythrin; an example of a luminescent material includes luminol; examples of bioluminescent materials include luciferase, luciferin, and aequorin, and examples of suitable radioactive material include ¹²⁵I, ¹³¹I, ³⁵S or ³H.

[0717] Further, an antibody (or fragment thereof) can be conjugated to a therapeutic moiety such as a cytotoxin, a therapeutic agent or a radioactive metal ion. A cytotoxin or cytotoxic agent includes any agent that is detrimental to cells. Examples include taxol, cytochalasin B, gramicidin D, ethidium bromide, emetine, mitomycin, etoposide, tenoposide, vincristine, vinblastine, colchicin, doxorubicin, daunorubicin, dihydroxy anthracin dione, mitoxantrone, mithramycin, actinomycin D, 1-dehydrotestosterone, glucocorticoids, procaine, tetracaine, lidocaine, propranolol, and puromycin and analogs or homologs thereof. Therapeutic agents include, but are not limited to, antimetabolites (e.g., methotrexate, 6-mercaptopurine, 6-thioguanine, cytarabine, 5-fluorouracil decarbazine), alkylating agents (e.g., mechlorethamine, thioepa chlorambucil, melphalan, carmustine (BSNU) and lomustine (CCNU), cyclothosphamide, busulfan, dibromomannitol, streptozotocin, mitomycin C, and cis-dichlorodiamine platinum (II) (DDP) cisplatin), anthracyclines (e.g., daunorubicin (formerly daunomycin) and doxorubicin), antibiotics (e.g., dactinomycin (formerly actinomycin), bleomycin, mithramycin, and anthramycin (AMC)), and anti-mitotic agents (e.g., vincristine and vinblastine).

[0718] The conjugates of the invention can be used for modifying a given biological response, the drug moiety is not to be construed as limited to classical chemical therapeutic agents. For example, the drug moiety may be a protein or polypeptide possessing a desired biological activity. Such proteins may include, for example, a toxin such as abrin, ricin A, pseudomonas exotoxin, or diphtheria toxin; a protein such as tumor necrosis factor, .alpha.-interferon, .beta.-interferon, nerve growth factor, platelet derived growth factor, tissue plasminogen activator; or, biological response modifiers such as, for example, lymphokines, interleukin-1 (“IL-1”), interleukin-2 (“IL-2”), interleukin-6 (“IL-6”), granulocyte macrophase colony stimulating factor (“GM-CSF”), granulocyte colony stimulating factor (“G-CSF”), or other growth factors.

[0719] Techniques for conjugating such therapeutic moiety to antibodies are well known, see, e.g., Amon et al., “Monoclonal Antibodies For Immunotargeting Of Drugs In Cancer Therapy”, in Monoclonal Antibodies And Cancer Therapy, Reisfeld et al. (eds.), pp. 243-56 (Alan R. Liss, Inc. 1985); Hellstrom et al., “Antibodies For Drug Delivery”, in Controlled Drug Delivery (2nd Ed.), Robinson et al. (eds.), pp. 623-53 (Marcel Dekker, Inc. 1987); Thorpe, “Antibody Carriers Of Cytotoxic Agents In Cancer Therapy: A Review”, in Monoclonal Antibodies '84: Biological And Clinical Applications, Pinchera et al. (eds.), pp. 475-506 (1985); “Analysis, Results, And Future Prospective Of The Therapeutic Use Of Radiolabeled Antibody In Cancer Therapy”, in Monoclonal Antibodies For Cancer Detection And Therapy, Baldwin et al. (eds.), pp. 303-16 (Academic Press 1985), and Thorpe et al., “The Preparation And Cytotoxic Properties Of Antibody-Toxin Conjugates”, Immunol. Rev., 62:119-58 (1982).

[0720] Alternatively, an antibody can be conjugated to a second antibody to form an antibody heteroconjugate as described by Segal in U.S. Pat. No. 4,676,980, incorporated herein by reference in its entirety.

[0721] Accordingly, in one aspect, the invention provides substantially purified antibodies or fragment thereof, and human and non-human antibodies or fragments thereof, which antibodies or fragments specifically bind to a polypeptide comprising an amino acid sequence selected from the group consisting of: the amino acid sequence of any one of SEQ ID NOs: 2, 25, 28, 30, 32, 34, 36, 38, 40, 42, 44 or 46, or an amino acid sequence encoded by the cDNA of a clone deposited as ATCC® 98348; a fragment of at least 15 amino acid residues of the amino acid sequence of any one of SEQ ID NOs: 2, 25, 28, 30, 32, 34, 36, 38, 40, 42, 44 or 46, an amino acid sequence which is at least 95% identical to the amino acid sequence of any one of SEQ ID NOs: 2, 25, 28, 30, 32, 34, 36, 38, 40, 42, 44 or 46, wherein the percent identity is determined using the ALIGN program of the GCG software package with a PAM120 weight residue table, a gap length penalty of 12, and a gap penalty of 4; and an amino acid sequence which is encoded by a nucleic acid molecule which hybridizes to the nucleic acid molecule consisting of any one of SEQ ID Nos:1, 3, 24, 26, 27, 29, 31, 33, 35, 37, 39, 41, 43 or 45, or the cDNA of a clone deposited as ATCC® 98348, or a complement thereof, under conditions of hybridization of 6×SSC at 45° C. and washing in 0.2×SSC, 0.1% SDS at 65° C. In various embodiments, the substantially purified antibodies of the invention, or fragments thereof, can be human, non-human, chimeric and/or humanized antibodies.

[0722] In another aspect, the invention provides human and non-human antibodies or fragments thereof, which antibodies or fragments specifically bind to a polypeptide comprising an amino acid sequence selected from the group consisting of: the amino acid sequence of any one of SEQ ID NOs: 2, 25, 28, 30, 32, 34, 36, 38, 40, 42, 44 or 46, or an amino acid sequence encoded by the cDNA of a clone deposited as ATCC® 98348; a fragment of at least 15 amino acid residues of the amino acid sequence of any one of SEQ ID NOs: 2, 25, 28, 30, 32, 34, 36, 38, 40, 42, 44 or 46, an amino acid sequence which is at least 95% identical to the amino acid sequence of any one of SEQ ID NOs: 2, 25, 28, 30, 32, 34, 36, 38, 40, 42, 44 or 46, wherein the percent identity is determined using the ALIGN program of the GCG software package with a PAM120 weight residue table, a gap length penalty of 12, and a gap penalty of 4; and an amino acid sequence which is encoded by a nucleic acid molecule which hybridizes to the nucleic acid molecule consisting of any one of SEQ ID Nos:1, 3, 24, 26, 27, 29, 31, 33, 35, 37, 39, 41, 43 or 45, or the cDNA of a clone deposited as ATCC® 98348, or a complement thereof, under conditions of hybridization of 6×SSC at 45° C. and washing in 0.2×SSC, 0.1% SDS at 65° C. Such non-human antibodies can be goat, mouse, sheep, horse, chicken, rabbit, or rat antibodies. Alternatively, the non-human antibodies of the invention can be chimeric and/or humanized antibodies. In addition, the non-human antibodies of the invention can be polyclonal antibodies or monoclonal antibodies.

[0723] In still a further aspect, the invention provides monoclonal antibodies or fragments thereof, which antibodies or fragments specifically bind to a polypeptide comprising an amino acid sequence selected from the group consisting of: the amino acid sequence of any one of SEQ ID NOs: 2, 25, 28, 30, 32, 34, 36, 38, 40, 42, 44 or 46, or an amino acid sequence encoded by the cDNA of a clone deposited as ATCC® 98348; a fragment of at least 15 amino acid residues of the amino acid sequence of any one of SEQ ID NOs: 2, 25, 28, 30, 32, 34, 36, 38, 40, 42, 44 or 46, an amino acid sequence which is at least 95% identical to the amino acid sequence of any one of SEQ ID NOs: 2, 25, 28, 30, 32, 34, 36, 38, 40, 42, 44 or 46, wherein the percent identity is determined using the ALIGN program of the GCG software package with a PAM120 weight residue table, a gap length penalty of 12, and a gap penalty of 4; and an amino acid sequence which is encoded by a nucleic acid molecule which hybridizes to the nucleic acid molecule consisting of any one of SEQ ID NOs: 1, 3, 24, 26, 27, 29, 31, 33, 35, 37, 39, 41, 43 or 45, or the cDNA of a clone deposited as any of ATCC® 98348, or a complement thereof, under conditions of hybridization of 6×SSC at 45° C. and washing in 0.2×SSC, 0.1% SDS at 65° C. The monoclonal antibodies can be human, humanized, chimeric and/or non-human antibodies.

[0724] The substantially purified antibodies or fragments thereof specifically bind to a signal peptide, a secreted sequence, an extracellular domain, a transmembrane or a cytoplasmic domain cytoplasmic membrane of a polypeptide of the invention. In a particularly preferred embodiment, the substantially purified antibodies or fragments thereof, the human and non-human antibodies or fragments thereof, and/or the monoclonal antibodies or fragments thereof, of the invention specifically bind to a secreted sequence or an extracellular domain of the amino acid sequence of SEQ ID NOs: 2, 25, 28, 30, 32, 34, 36, 38, 40, 42, 44 or 46. Preferably, the secreted sequence or extracellular domain to which the antibody, or fragment thereof, binds comprises from about amino acids 1-529 or 18-529 of SEQ ID NO: 2, or from amino acids 1-530 or 18-530 of SEQ ID NO: 25.

[0725] Any of the antibodies of the invention can be conjugated to a therapeutic moiety or to a detectable substance. Non-limiting examples of detectable substances that can be conjugated to the antibodies of the invention are an enzyme, a prosthetic group, a fluorescent material, a luminescent material, a bioluminescent material, and a radioactive material.

[0726] The invention also provides a kit containing an antibody of the invention, and instructions for use. In another embodiment, a kit comprising an antibody of the invention conjugated to a detectable substance and instructions for use. Still another aspect of the invention is a pharmaceutical composition comprising an antibody of the invention and a pharmaceutically acceptable carrier. In preferred embodiments, the pharmaceutical composition contains an antibody of the invention, a therapeutic moiety, and a pharmaceutically acceptable carrier.

[0727] Still another aspect of the invention is a method of making an antibody that binds, that is, is directed against, Delta3, the method comprising immunizing a mammal with a polypeptide. The polypeptide used as an immungen comprises an amino acid sequence selected from the group consisting of: the amino acid sequence of any one of SEQ ID NOs: 2, 25, 28, 30, 32, 34, 36, 38, 40, 42, 44 or 46, or an amino acid sequence encoded by the cDNA of a clone deposited as ATCC® 98348; a fragment of at least 15 amino acid residues of the amino acid sequence of any one of SEQ ID NOs: 2, 25, 28, 30, 32, 34, 36, 38, 40, 42, 44 or 46, an amino acid sequence which is at least 95% identical to the amino acid sequence of any one of SEQ ID NOs: 2, 25, 28, 30, 32, 34, 36, 38, 40, 42, 44 or 46, wherein the percent identity is determined using the ALIGN program of the GCG software package with a PAM1120 weight residue table, a gap length penalty of 12, and a gap penalty of 4; and an amino acid sequence which is encoded by a nucleic acid molecule which hybridizes to the nucleic acid molecule consisting of any one of SEQ ID NOs:1, 3, 24, 26, 27, 29, 31, 33, 35, 37, 39, 41, 43 or 45, or the cDNA of a clone deposited as ATCC® 98348, or a complement thereof, under conditions of hybridization of 6×SSC at 45° C. and washing in 0.2×SSC, 0.1% SDS at 65° C. After immunization, a sample is collected from the mammal that contains an antibody that specifically recognizes Delta3. Preferably, the polypeptide is recombinantly produced using a non-human host cell. Optionally, the antibodies can be further purified from the sample using techniques well known to those of skill in the art. The method can further comprise producing a monoclonal antibody-producing cell from the cells of the mammal. Optionally, antibodies are collected from the antibody-producing cell.

### Isolated FTHMA-070, Tango85, Tango77, SPOIL, NEOKINE, Tango129 or A259 Proteins and Anti- or Anti-T85 Antibodies

[0728] One aspect of the invention pertains to isolated FTHMA-070, Tango85, Tango77, SPOIL, NEOKINE, Tango129 or A259 proteins, and biologically active portions thereof, as well as polypeptide fragments suitable for use as immunogens to raise anti-FTHMA-070, Tango85, Tango77, SPOIL, NEOKINE, Tango129 or A259 antibodies. In one embodiment, native FTHMA-070, Tango85, Tango77, SPOIL, NEOKINE, Tango129 or A259 proteins can be isolated from cells or tissue sources by an appropriate purification scheme using standard protein purification techniques. In another embodiment, FTHMA-070, Tango85, Tango77, SPOIL, NEOKINE, Tango129 or A259 proteins are produced by recombinant DNA techniques. Alternative to recombinant expression, a FTHMA-070, Tango85, Tango77, SPOIL, NEOKINE, Tango129 or A259 protein or polypeptide can be synthesized chemically using standard peptide synthesis techniques.

[0729] An “isolated” or “purified” protein or biologically active portion thereof is substantially free of cellular material or other contaminating proteins from the cell or tissue source from which the FTHMA-070, Tango85, Tango77, SPOIL, NEOKINE, Tango129 or A259 protein is derived, or substantially free from chemical precursors or other chemicals when chemically synthesized. The language “substantially free of cellular material” includes preparations of FTHMA-070, Tango85, Tango77, SPOIL, NEOKINE, Tango129 or A259 protein in which the protein is separated from cellular components of the cells from which it is isolated or recombinantly produced. Thus, FTHMA-070, Tango85, Tango77, SPOIL, NEOKINE, Tango129 or A259 protein that is substantially free of cellular material includes preparations of FTHMA-070, Tango85, Tango77, SPOIL, NEOKINE, Tango129 or A259 protein having less than about 30%, 20%, 10%, or 5% (by dry weight) of non-FTHMA-070, Tango85, Tango77, SPOIL, NEOKINE, Tango129 or A259 protein (also referred to herein as a “contaminating protein”). When the FTHMA-070, Tango85, Tango77, SPOIL, NEOKINE, Tango129 or A259 protein or biologically active portion thereof is recombinantly produced, it is also preferably substantially free of culture medium, i.e., culture medium represents less than about 20%, 10%, or 5% of the volume of the protein preparation. When FTHMA-070, Tango85, Tango77, SPOIL, NEOKINE, Tango129 or A259 protein is produced by chemical synthesis, it is preferably substantially free of chemical precursors or other chemicals, i.e., it is separated from chemical precursors or other chemicals which are involved in the synthesis of the protein. Accordingly such preparations of FTHMA-070, Tango85, Tango77, SPOIL, NEOKINE, Tango129 or A259 protein have less than about 30%, 20%, 10%, 5% (by dry weight) of chemical precursors or non-FTHMA-070, Tango85, Tango77, SPOIL, NEOKINE, Tango129 or A259 chemicals.

[0730] Biologically active portions of a FTHMA-070, Tango85, Tango77, SPOIL, NEOKINE, Tango129 or A259 protein include peptides comprising amino acid sequences sufficiently identical to or derived from the amino acid sequence of the FTHMA-070, Tango85, Tango77, SPOIL, NEOKINE, Tango129 or A259 protein, which include less amino acids than the full length FTHMA-070, Tango85, Tango77, SPOIL, NEOKINE, Tango129 or A259 proteins, and exhibit at least one activity of a FTHMA-070, Tango85, Tango77, SPOIL, NEOKINE, Tango129 or A259 protein. Typically, biologically active portions comprise a domain or motif with at least one activity of the FTHMA-070, Tango85, Tango77, SPOIL, NEOKINE, Tango129 or A259 protein. A biologically active portion of a FTHMA-070, Tango85, Tango77, SPOIL, NEOKINE, Tango129 or A259 protein can be a polypeptide which is, for example, 10, 25, 50, 100 or more amino acids in length. Preferred biologically active polypeptides include one or more identified structural domains. Preferred biologically active polypeptides include one or more identified T129 structural domains, e.g., TNFR/NGFR cysteine-rich domain (SEQ ID NO:142).

[0731] Moreover, other biologically active portions, in which other regions of the protein are deleted, can be prepared by recombinant techniques and evaluated for one or more of the functional activities of a native FTHMA-070 or T85 protein. Preferred FTHMA-070 or T85 protein has the amino acid sequence shown of SEQ ID NO:54 or SEQ ID NO:58, respectively. Other useful FTHMA-070 or T85 proteins are substantially identical to SEQ ID NO:54 or SEQ ID NO:58, respectively and retain the functional activity of the refernce protein yet differ in amino acid sequence due to natural allelic variation or mutagenesis.

[0732] Accordingly, a useful FTHMA-070 protein is a protein which includes an amino acid sequence at least about 45%, preferably 55%, 65%, 75%, 85%, 95%, or 99% identical to the amino acid sequence of SEQ ID NO:54 and retains the functional activity of the FTHMA-070 protein of SEQ ID NO:54. In a preferred embodiment, the FTHMA-070 protein retains the functional activity of the FTHMA-070 protein of SEQ ID NO:54.

[0733] Accordingly, a useful T85 protein is a protein which includes an amino acid sequence at least about 45%, preferably 55%, 65%, 75%, 85%, 95%, or 99% identical to the amino acid sequence of SEQ ID NO:58 and retains the functional activity of the T85 protein of SEQ ID NO:58. In other instances, the T85 protein is a protein having an amino acid sequence 55%, 65%, 75%, 85%, 95%, or 98% identical to one of the T85 fibronectin type III or Ig superfamily domains (SEQ ID NOs:61-67). In a preferred embodiment, the T85 protein retains the functional activity of the T85 protein of SEQ ID NO:58.

[0734] Preferred Tango-77 protein has the amino acid sequence shown of SEQ ID NO:72, SEQ ID NO:75, SEQ ID NO:77, SEQ ID NO:79, SEQ ID NO:81, or SEQ ID NO:83. Other useful Tango-77 proteins are substantially identical to SEQ ID NO:72, SEQ ID NO:75, SEQ ID NO:77, SEQ ID NO:79, SEQ ID NO:81, or SEQ ID NO:83 and retain the functional activity of the protein of SEQ ID NO:72, SEQ ID NO:75, SEQ ID NO:77, SEQ ID NO:79, SEQ ID NO:81, or SEQ ID NO:83 yet differ in amino acid sequence due to natural allelic variation or mutagenesis. Accordingly, a useful Tango-77 protein is a protein which includes an amino acid sequence at least about 45%, preferably 55%, 65%, 75%, 85%, 95%, or 99% identical to the amino acid sequence of SEQ ID NO:72, SEQ ID NO:75, SEQ ID NO:77, SEQ ID NO:79, SEQ ID NO:81, or SEQ ID NO:83 and retains the functional activity of the Tango-77 proteins of SEQ ID NO:72, SEQ ID NO:75, SEQ ID NO:77, SEQ ID NO:79, SEQ ID NO:81, or SEQ ID NO:83. In a preferred embodiment, the Tango-77 protein retains a functional activity of the Tango-77 protein of SEQ ID NO:72, SEQ ID NO:75, SEQ ID NO:77, SEQ ID NO:79, SEQ ID NO:81, or SEQ ID NO:83.

[0735] In one embodiment, a biologically active portion of a SPOIL protein comprises at least an IL-1 signature domain. In another embodiment, a biologically active portion of a SPOIL protein comprises a SPOIL signature motif. In yet another embodiment, a biologically active portion of a SPOIL protein comprises a SPOIL unique domain. In yet another embodiment, a biologically active portion of a SPOIL protein comprises a SPOIL C-terminal unique domain. In another embodiment, a biologically active portion of a SPOIL protein comprises a signal sequence and/or is secreted. In another embodiment, a biologically active portion of a SPOIL protein lacks a signal sequence and/or is intracellular.

[0736] It is to be understood that a preferred biologically active portion of a SPOIL protein of the present invention may contain at least one of the above-identified structural domains. Another preferred biologically active portion of a SPOIL protein may contain at least two of the above-identified structural domains. Another preferred biologically active portion of a SPOIL protein may contain at least three or more of the above-identified structural domains.

[0737] Moreover, other biologically active portions, in which other regions of the protein are deleted, can be prepared by recombinant techniques and evaluated for one or more of the functional activities of a native SPOIL protein.

[0738] In a preferred embodiment, the SPOIL protein has an amino acid sequence shown in SEQ ID NO:90, SEQ ID NO:102, SEQ ID NO:105, SEQ ID NO:113, the amino acid sequence encoded by the DNA insert of the plasmid deposited with ATCC as Accession Number 98883, or the amino acid sequence encoded by the DNA insert of the plasmid deposited with ATCC as Accession Number 98984. In other embodiments, the SPOIL protein is substantially homologous to SEQ ID NO:90, SEQ ID NO:102, SEQ ID NO:105, SEQ ID NO:113, the amino acid sequence encoded by the DNA insert of the plasmid deposited with ATCC as Accession Number 98883, or the amino acid sequence encoded by the DNA insert of the plasmid deposited with ATCC as Accession Number 98984, and retains the functional activity of the protein of SEQ ID NO:90, SEQ ID NO:102, SEQ ID NO:105, SEQ ID NO:113, the amino acid sequence encoded by the DNA insert of the plasmid deposited with ATCC as Accession Number 98883, or the amino acid sequence encoded by the DNA insert of the plasmid deposited with ATCC as Accession Number 98984, yet differs in amino acid sequence due to natural allelic variation or mutagenesis, as described in detail in subsection I above. Accordingly, in another embodiment, the SPOIL protein is a protein which comprises an amino acid sequence at least about 60-65% identical to the amino acid sequence of SEQ ID NO:90, SEQ ID NO:102, SEQ ID NO:105, SEQ ID NO:113, the amino acid sequence encoded by the DNA insert of the plasmid deposited with ATCC as Accession Number 98883, or the amino acid sequence encoded by the DNA insert of the plasmid deposited with ATCC as Accession Number 98984, and, preferably, retains a functional activity of the SPOIL proteins of SEQ ID NO:90, SEQ ID NO:102, SEQ ID NO:105, SEQ ID NO:113, the amino acid sequence encoded by the DNA insert of the plasmid deposited with ATCC as Accession Number 98883, or the amino acid sequence encoded by the DNA insert of the plasmid deposited with ATCC as Accession Number 98984. Preferably, the protein is at least about 70-75% identical to SEQ ID NO:90, SEQ ID NO:102, SEQ ID NO:105, SEQ ID NO:113, the amino acid sequence encoded by the DNA insert of the plasmid deposited with ATCC as Accession Number 98883, or the amino acid sequence encoded by the DNA insert of the plasmid deposited with ATCC as Accession Number 98984, more preferably at least about 80-85% identical to SEQ ID NO:90, SEQ ID NO:102, SEQ ID NO:105, SEQ ID NO:113, the amino acid sequence encoded by the DNA insert of the plasmid deposited with ATCC as Accession Number 98883, or the amino acid sequence encoded by the DNA insert of the plasmid deposited with ATCC as Accession Number 98984, even more preferably at least about 90-95% identical to SEQ ID NO:90, SEQ ID NO:102, SEQ ID NO:105, SEQ ID NO:113, the amino acid sequence encoded by the DNA insert of the plasmid deposited with ATCC as Accession Number 98883, or the amino acid sequence encoded by the DNA insert of the plasmid deposited with ATCC as Accession Number 98984, and most preferably at least about 95% or more identical to SEQ ID NO:90, SEQ ID NO:102, SEQ ID NO:105, SEQ ID NO:113, the amino acid sequence encoded by the DNA insert of the plasmid deposited with ATCC as Accession Number 98883, or the amino acid sequence encoded by the DNA insert of the plasmid deposited with ATCC as Accession Number 98984.

[0739] In one embodiment, a biologically active portion of a NEOKINE protein comprises at least a NEOKINE CXC signature motif. In another embodiment, a biologically active portion of a NEOKINE protein comprises at least a signal sequence. In another embodiment, a biologically active portion of a NEOKINE protein comprises a NEOKINE amino acid sequence lacking a signal sequence (e.g., a mature NEOKINE protein).

[0740] It is to be understood that a preferred biologically active portion of a NEOKINE protein of the present invention may contain at least one of the above-identified structural domains. A more preferred biologically active portion of a NEOKINE protein may contain at least two of the above-identified structural domains. Moreover, other biologically active portions, in which other regions of the protein are deleted, can be prepared by recombinant techniques and evaluated for one or more of the functional activities of a native NEOKINE protein.

[0741] In a preferred embodiment, the NEOKINE protein has an amino acid sequence shown in SEQ ID NO:116, SEQ ID NO:119, SEQ ID NO:122, or SEQ ID NO:125. In other embodiments, the NEOKINE protein is substantially homologous to SEQ ID NO:116, SEQ ID NO:119, SEQ ID NO:122, or SEQ ID NO:125, and retains the functional activity of the protein of SEQ ID NO:116, SEQ ID NO:119, SEQ ID NO:122, or SEQ ID NO:125, yet differs in amino acid sequence due to natural allelic variation or mutagenesis, as described in detail in subsection I above. Accordingly, in another embodiment, the NEOKINE protein is a protein which comprises an amino acid sequence at least about 60% homologous to the amino acid sequence of SEQ ID NO:116, SEQ ID NO:119, SEQ ID NO:122, or SEQ ID NO:125 and retains the functional activity of the NEOKINE proteins of SEQ ID NO:116, SEQ ID NO:119, SEQ ID NO:122, or SEQ ID NO:125, respectively. Preferably, the protein is at least about 70% homologous to SEQ ID NO:116, SEQ ID NO:119, SEQ ID NO:122, or SEQ ID NO:125, more preferably at least about 80% homologous to SEQ ID NO:116, SEQ ID NO:119, SEQ ID NO:122, or SEQ ID NO:125, even more preferably at least about 90% homologous to SEQ ID NO:116, SEQ ID NO:119, SEQ ID NO:122, or SEQ ID NO:125, and most preferably at least about 95% or more homologous to SEQ ID NO:116, SEQ ID NO:119, SEQ ID NO:122, or SEQ ID NO:125.

[0742] Preferred T129 protein has the amino acid sequence shown of SEQ ID NO:138. Other useful T129 proteins are substantially identical to SEQ ID NO:138 and retain the functional activity of the protein of SEQ ID NO:138 yet differ in amino acid sequence due to natural allelic variation or mutagenesis. Accordingly, a useful T129 protein is a protein which includes an amino acid sequence at least about 45%, preferably 55%, 65%, 75%, 85%, 95%, or 99% identical to the amino acid sequence of SEQ ID NO:138 and retains the functional activity of the T129 proteins of SEQ ID NO:138. In other instances, the T129 protein is a protein having an amino acid sequence 55%, 65%, 75%, 85%, 95%, or 98% identical to the T129 TNFR/NGFR cysteine rich domain (SEQ ID NO:141). In a preferred embodiment, the T129 protein retains the functional activity of the T129 protein of SEQ ID NO:138.

[0743] Preferred polypeptides have the amino acid sequence of SEQ ID NO:147, 148, 165, or 166. Other useful proteins are substantially identical (e.g., at least about 45%, preferably 55%, 65%, 75%, 85%, 95%, or 99%) to any of SEQ ID NO:147, 148, 165, or 166, and retain the functional activity of the protein of the corresponding naturally-occurring protein yet differ in amino acid sequence due to natural allelic variation or mutagenesis.

[0744] To determine the percent identity of two amino acid sequences or of two nucleic acids, the sequences are aligned for optimal comparison purposes (e.g., gaps can be introduced in the sequence of a first amino acid or nucleic acid sequence for optimal alignment with a second amino or nucleic acid sequence). The amino acid residues or nucleotides at corresponding amino acid positions or nucleotide positions are then compared.

[0745] To determine the percent identity of two amino acid sequences or of two nucleic acids, the sequences are aligned for optimal comparison purposes (e.g., gaps can be introduced in the sequence of a first amino acid or nucleic acid sequence for optimal alignment with a second amino or nucleic acid sequence and non-homologous sequences can be disregarded for comparison purposes). In one embodiment, an alignment is a global alignment, e.g., an overall sequence alignment. In another embodiment, an alignment is a local alignment. In a preferred embodiment, the length of a sequence aligned for comparison purposes is at least 30%, preferably at least 40%, more preferably at least 50%, even more preferably at least 60%, and even more preferably at least 70%, 80%, or 90% of the length of the reference sequence to which it is aligned (e.g., when aligning a second sequence to the SPOIL amino acid sequence of SEQ ID NO:90, at least 29, preferably at least 39, more preferably at least 49, even more preferably at least 59, and even more preferably at least 69, 78 or 88 amino acid residues are aligned). In a particularly preferred embodiment, percent identity is calculated over the entire length of a reference sequence. The amino acid residues or nucleotides at corresponding amino acid positions or nucleotide positions are then compared.

[0746] To determine the percent homology of two amino acid sequences or of two nucleic acids, the sequences are aligned for optimal comparison purposes (e.g., gaps can be introduced in the sequence of a first amino acid or nucleic acid sequence for optimal alignment with a second amino or nucleic acid sequence and non-homologous sequences can be disregarded for comparison purposes). In a preferred embodiment, the length of a reference sequence aligned for comparison purposes is at least 30%, preferably at least 40%, more preferably at least 50%, even more preferably at least 60%, and even more preferably at least 70%, 80%, or 90% of the length of the reference sequence (e.g., when aligning a second sequence to the NEOKINE amino acid sequence of SEQ ID NO:2 having 99 amino acid residues, at least 30, preferably at least 40, more preferably at least 50, even more preferably at least 59, and even more preferably at least 69, 79, or 89 are aligned). The amino acid residues or nucleotides at corresponding amino acid positions or nucleotide positions are then compared.

[0747] When a position in the first sequence is occupied by the same amino acid residue or nucleotide as the corresponding position in the second sequence, then the molecules are homologous at that position (i.e., as used herein amino acid or nucleic acid “homology” is equivalent to amino acid or nucleic acid “identity”). The percent homology between the two sequences is a function of the number of identical positions shared by the sequences (i.e., % homology=# of identical positions/total # of positions ×100).

[0748] The determination of percent homology between two sequences can be accomplished using a mathematical algorithm. A preferred, non-limiting example of a mathematical algorithm utilized for the comparison of two sequences is the algorithm of Karlin and Altschul (1990) Proc. Nat'l Acad. Sci. USA 87:2264-2268, modified as in Karlin and Altschul (1993) Proc. Nat'l Acad. Sci. USA 90:5873-5877. Such an algorithm is incorporated into the NBLAST and XBLAST programs of Altschul, et al. (1990) J. Mol. Biol. 215:403-410. BLAST nucleotide searches can be performed with the NBLAST program, score=100, wordlength=12 to obtain nucleotide sequences homologous to FTHMA-070, Tango85, Tango77, SPOIL, NEOKINE, Tango129 or A259 nucleic acid molecules of the invention. BLAST protein searches can be performed with the XBLAST program, score=50, wordlength=3 to obtain amino acid sequences homologous to FTHMA-070, Tango85, Tango77, SPOIL, NEOKINE, Tango129 or A259 protein molecules of the invention. To obtain gapped alignments for comparison purposes, Gapped BLAST can be utilized as described in Altschul et al., (1997) Nucleic Acids Res. 25:3389-3402. When utilizing BLAST and Gapped BLAST programs, the default parameters of the respective programs (e.g., XBLAST and NBLAST) can be used. Another preferred, non-limiting example of a mathematical algorithm utilized for the comparison of sequences is the algorithm of Myers and Miller, CABIOS (1989). Such an algorithm is incorporated into the ALIGN program (version 2.0) which is part of the GCG sequence alignment software package. When utilizing the ALIGN program for comparing amino acid sequences, a PAM120 weight residue table, a gap length penalty of 12, and a gap penalty of 4 can be used.

[0749] The nucleic acid and protein sequences of the present invention can further be used as a “query sequence” to perform a search against public databases to, for example, identify other family members or related sequences. Such searches can be performed using the NBLAST and XBLAST programs (version 2.0) of Altschul, et al. (1990) J. Mol. Biol. 215:403-10. BLAST nucleotide searches can be performed with the NBLAST program, score=100, wordlength=12 to obtain nucleotide sequences homologous to nucleic acid molecules of the invention. BLAST protein searches can be performed with the XBLAST program, score=50, wordlength=3 to obtain amino acid sequences homologous to protein molecules of the invention. To obtain gapped alignments for comparison purposes, Gapped BLAST can be utilized as described in Altschul et al., (1997) Nucleic Acids Res. 25(17):3389-3402. When utilizing BLAST and Gapped BLAST programs, the default parameters of the respective programs (e.g., XBLAST and NBLAST) can be used.

[0750] Another preferred, non-limiting example of a mathematical algorithm utilized for the comparison of sequences is the algorithm of Myers and Miller, CABIOS (1989). Such an algorithm is incorporated into the ALIGN program (version 2.0) which is part of the CGC sequence alignment software package. When utilizing the ALIGN program for comparing amino acid sequences, a PAM120 weight residue table, a gap length penalty of 12, and a gap penalty of 4 can be used. Additional algorithms for sequence analysis are known in the art and include ADVANCE and ADAM as described in Torellis and Robotti (1994) Comput. Appl. Biosci., 10:3-5; and FASTA described in Pearson and Lipman (1988) Proc. Natl. Acad. Sci. 85:2444-8. Within FASTA, ktup is a control option that sets the sensitivity and speed of the search. If ktup=2, similar regions in the two sequences being compared are found by looking at pairs of aligned residues; if ktup=1, single aligned amino acids are examined. ktup can be set to 2 or 1 for protein sequences, or from 1 to 6 for DNA sequences. The default if ktup is not specified is 2 for proteins and 6 for DNA.

[0751] The percent identity between two sequences can be determined using techniques similar to those described above, with or without allowing gaps. In calculating percent identity, only exact matches are counted.

[0752] The invention also provides FTHMA-070, Tango85, Tango77, SPOIL, NEOKINE, Tango129 or A259 chimeric or fusion proteins. As used herein, a FTHMA-070, Tango85, Tango77, SPOIL, NEOKINE, Tango129 or A259 “chimeric protein” or “fusion protein” comprises a FTHMA-070, Tango85, Tango77, SPOIL, NEOKINE, Tango129 or A259 polypeptide operatively linked to a non-FTHMA-070, Tango85, Tango77, SPOIL, NEOKINE, Tango129 or A259 polypeptide. A FTHMA-070, Tango85, Tango77, SPOIL, NEOKINE, Tango129 or A259 polypeptide refers to a polypeptide having an amino acid sequence corresponding to FTHMA-070, Tango85, Tango77, SPOIL, NEOKINE, Tango129 or A259, whereas a non-FTHMA-070, Tango85, Tango77, SPOIL, NEOKINE, Tango129 or A259 polypeptide refers to a polypeptide having an amino acid sequence corresponding to a protein which is not substantially identical to the FTHMA-070, Tango85, Tango77, SPOIL, NEOKINE, Tango129 or A259 protein, e.g., a protein which is different from the FTHMA-070, Tango85, Tango77, SPOIL, NEOKINE, Tango129 or A259 protein and which is derived from the same or a different organism. Within a FTHMA-070, Tango85, Tango77, SPOIL, NEOKINE, Tango129 or A259 fusion protein the FTHMA-070 or T85 polypeptide can correspond to all or a portion of a FTHMA-070, Tango85, Tango77, SPOIL, NEOKINE, Tango129 or A259 protein, preferably at least one biologically active portion of a FTHMA-070, Tango85, Tango77, SPOIL, NEOKINE, Tango129 or A259 protein. Within the fusion protein, the term “operatively linked” is intended to indicate that the FTHMA-070, Tango85, Tango77, SPOIL, NEOKINE, Tango129 or A259 polypeptide and the non-FTHMA-070 or T85 polypeptide are fused in-frame to each other. The non-FTHMA-070, Tango85, Tango77, SPOIL, NEOKINE, Tango129 or A259 polypeptide can be fused to the N-terminus or C-terminus of the FTHMA-070, Tango85, Tango77, SPOIL, NEOKINE, Tango129 or A259 polypeptide.

[0753] One useful fusion protein is a GST-FTHMA-070, Tango85, Tango77, SPOIL, NEOKINE, Tango129 or A259 fusion protein in which the FTHMA-070, Tango85, Tango77, SPOIL, NEOKINE, Tango129 or A259 sequences are fused to the C-terminus of the GST sequences. Such fusion proteins can facilitate the purification of recombinant FTHMA-070, Tango85, Tango77, SPOIL, NEOKINE, Tango129 or A259.

[0754] In another embodiment, the fusion protein is a FTHMA-070, Tango85, SPOIL, or NEOKINE protein containing a heterologous signal sequence at its N-terminus. For example, the native FTHMA-070, Tango85, SPOIL, or NEOKINE signal sequence can be removed and replaced with a signal sequence from another protein. In certain host cells (e.g., mammalian host cells), expression and/or secretion of FTHMA-070, Tango85, SPOIL, or NEOKINE can be increased through use of a heterologous signal sequence.

[0755] In another embodiment, the fusion protein is a Tango-77, Tango129 or A259 protein containing a heterologous signal sequence at its N-terminus. For example, the native Tango-77, Tango129 or A259 signal sequence (i.e., about amino acids 1 to 63 of SEQ ID NO:72; SEQ ID NO:74; or about amino acids 1 to 52 of SEQ ID NO:77; SEQ ID NO:78; or about amino acids 1 to 21 of SEQ ID NO:81; SEQ ID NO:82) can be removed and replaced with a signal sequence from another protein. For example, the native T129 signal sequence (i.e., about amino acids 1 to 22 of SEQ ID NO:138) can be removed and replaced with a signal sequence from another protein. In certain host cells (e.g., mammalian host cells), expression and/or secretion of Tango-77 can be increased through use of a heterologous signal sequence. For example, the gp67 secretory sequence of the baculovirus envelope protein can be used as a heterologous signal sequence (Ausubel et al., supra). Other examples of eukaryotic heterologous signal sequences include the secretory sequences of melittin and human placental alkaline phosphatase (Stratagene; La Jolla, Calif.). In yet another example, useful prokaryotic heterologous signal sequences include the phoA secretory signal (Sambrook et al., supra) and the protein A secretory signal (Pharmacia Biotech; Piscataway, N.J.).

[0756] In yet another embodiment, the fusion protein is an FTHMA-070, Tango85, Tango77, Tango129 or A259-immunoglobulin fusion protein in which all or part of FTHMA-070 or T85 is fused to sequences derived from a member of the immunoglobulin protein family. The FTHMA-070, Tango85, Tango77, Tango129 or A259-immunoglobulin fusion proteins of the invention can be incorporated into pharmaceutical compositions and administered to a subject to inhibit an interaction between a FTHMA-070, Tango85, Tango77, Tango129 or A259 ligand and a FTHMA-070, Tango85, Tango77, Tango129 or A259 protein. The FTHMA-070, Tango85, Tango77, Tango129 or A259-immunoglobulin fusion proteins can be used to affect the bioavailability of a FTHMA-070, Tango85, Tango77, Tango129 or A259 cognate ligand. Inhibition of the FTHMA-070, Tango85, Tango77, Tango129 or A259 ligand/FTHMA-070, Tango85, Tango77, Tango129 or A259 interaction may be useful therapeutically. Moreover, the FTHMA-070, Tango85, Tango77, Tango129 or A259-immunoglobulin fusion proteins of the invention can be used as immunogens to produce anti-FTHMA-070, Tango85, Tango77, Tango129 or A259 antibodies in a subject, to purify FTHMA-070, Tango85, Tango77, Tango129 or A259 ligands and in screening assays to identify molecules which inhibit the interaction of FTHMA-070, Tango85, Tango77, Tango129 or A259 with a FTHMA-070, Tango85, Tango77, Tango129 or A259 ligand.

[0757] In yet another embodiment, the fusion protein is a SPOIL or NEOKINE-immunoglobulin fusion protein in which the SPOIL or NEOKINE sequence are fused to sequences derived from a member of the immunoglobulin protein family. Soluble derivatives have also been made of cell surface glycoproteins in the immunoglobulin gene superfamily consisting of an extracellular domain of the cell surface glycoprotein fused to an immunoglobulin constant (Fc) region (see e.g., Capon et al. (1989) Nature 337:525-531 and Capon U.S. Pat. Nos. 5,116,964 and 5,428,130 [CD4-IgG1 constructs]; Linsley,et al. (1991) J. Exp. Med. 173:721-730 [a CD28-IgG1 construct and a B7-1-IgG1 construct]; and Linsley et al. (1991) J. Exp. Med. 174:561-569 and U.S. Pat. No. 5,434,131[a CTLA4-IgG1]). Such fusion proteins have proven useful for modulating receptor-ligand interactions. Soluble derivatives of cell surface proteins of the tumor necrosis factor receptor (TNFR) superfamily proteins have been made consisting of an extracellular domain of the cell surface receptor fused to an immunoglobulin constant (Fc) region (See for example Moreland et al. (1997) N. Engl. J. Med. 337(3):141-147; van der Poll et al. (1997) Blood 89(10):3727-3734; and Ammann et al. (1997) J. Clin. Invest. 99(7):1699-1703).

[0758] In yet another embodiment, the fusion protein comprises NEOKINE sequences (e.g., the NEOKINE CXC signature motif) fused to sequences form other CXC cytokines. For example, NEOKINE sequences C-terminal to and including the first conserved cysteine residues can be fused to N-terminal sequences of other non-NEOKINE chemokines (e.g., comprising from the N-terminal amino acid residue to the amino acid residue N-terminal to the first conserved cysteine).

[0759] The SPOIL or NEOKINE-immunoglobulin fusion proteins of the invention can be incorporated into pharmaceutical compositions and administered to a subject to inhibit an interaction between a SPOIL or NEOKINE protein and a SPOIL or NEOKINE target molecule on the surface of a cell, to thereby suppress SPOIL or NEOKINE—mediated signal transduction in vivo. The SPOIL or NEOKINE—immunoglobulin fusion proteins can be used to affect the bioavailability of a SPOIL or NEOKINE cognate ligand. Inhibition of the SPOIL or NEOKINE ligand/SPOIL or NEOKINE interaction may be useful therapeutically for both the treatment and modulation of inflammation and immune disorders, as well as modulating (e.g., promoting or inhibiting) immune cell responses, cell adhesion, and/or cell homing. Moreover, the SPOIL or NEOKINE—immunoglobulin fusion proteins of the invention can be used as immunogens to produce anti-SPOIL or NEOKINE antibodies in a subject, to purify SPOIL or NEOKINE ligands and in screening assays to identify molecules which inhibit the interaction of SPOIL or NEOKINE with a SPOIL or NEOKINE target molecule.

[0760] Preferably, a FTHMA-070, Tango85, Tango77, SPOIL, NEOKINE, Tango129 or A259 chimeric or fusion protein of the invention is produced by standard recombinant DNA techniques. For example, DNA fragments coding for the different polypeptide sequences are ligated together in-frame in accordance with conventional techniques, for example by employing blunt-ended or stagger-ended termini for ligation, restriction enzyme digestion to provide for appropriate termini, filling-in of cohesive ends as appropriate, alkaline phosphatase treatment to avoid undesirable joining, and enzymatic ligation. In another embodiment, the fusion gene can be synthesized by conventional techniques including automated DNA synthesizers. Alternatively, PCR amplification of gene fragments can be carried out using anchor primers which give rise to complementary overhangs between two consecutive gene fragments which can subsequently be annealed and reamplified to generate a chimeric gene sequence (see, e.g., Current Protocols in Molecular Biology, Ausubel et al. eds., John Wiley & Sons: 1992). Moreover, many expression vectors are commercially available that already encode a fusion moiety (e.g., a GST polypeptide). An FTHMA-070, Tango85, Tango77, SPOIL, NEOKINE, Tango129 or A259-encoding nucleic acid can be cloned into such an expression vector such that the fusion moiety is linked in-frame to the FTHMA-070, Tango85, Tango77, SPOIL, NEOKINE, Tango129 or A259 protein.

[0761] A signal sequence of a polypeptide of the invention (SEQ ID NO:149 and 163) can be used to facilitate secretion and isolation of the secreted protein or other proteins of interest. Signal sequences are typically characterized by a core of hydrophobic amino acids which are generally cleaved from the mature protein during secretion in one or more cleavage events. Such signal peptides contain processing sites that allow cleavage of the signal sequence from the mature proteins as they pass through the secretory pathway. Thus, the invention pertains to the described polypeptides having a signal sequence, as well as to the signal sequence itself and to the polypeptide in the absence of the signal sequence (i.e., the cleavage products). In one embodiment, a nucleic acid sequence encoding a signal sequence of the invention can be operably linked in an expression vector to a protein of interest, such as a protein which is ordinarily not secreted or is otherwise difficult to isolate. The signal sequence directs secretion of the protein, such as from a eukaryotic host into which the expression vector is transformed, and the signal sequence is subsequently or concurrently cleaved. The protein can then be readily purified from the extracellular medium by art recognized methods. Alternatively, the signal sequence can be linked to the protein of interest using a sequence which facilitates purification, such as with a GST domain.

[0762] In another embodiment, the signal sequences of the present invention can be used to identify regulatory sequences, e.g., promoters, enhancers, repressors. Since signal sequences are the most amino-terminal sequences of a peptide, it is expected that the nucleic acids which flank the signal sequence on its amino-terminal side will be regulatory sequences which affect transcription. Thus, a nucleotide sequence which encodes all or a portion of a signal sequence can be used as a probe to identify and isolate signal sequences and their flanking regions, and these flanking regions can be studied to identify regulatory elements therein.

[0763] The present invention also pertains to variants of the FTHMA-070, Tango85, Tango77, SPOIL, NEOKINE, Tango129 or A259 proteins which function as either FTHMA-070, Tango85, Tango77, SPOIL, NEOKINE, Tango129 or A259 agonists (mimetics) or as FTHMA-070, Tango85, Tango77, SPOIL, NEOKINE, Tango129 or A259 antagonists. Variants of the FTHMA-070, Tango85, Tango77, SPOIL, NEOKINE, Tango129 or A259 protein can be generated by mutagenesis, e.g., discrete point mutation or truncation of the FTHMA-070, Tango85, Tango77, SPOIL, NEOKINE, Tango129 or A259 protein. An agonist of the FTHMA-070, Tango85, Tango77, SPOIL, NEOKINE, Tango129 or A259 protein can retain substantially the same, or a subset, of the biological activities of the naturally occurring form of the FTHMA-070, Tango85, Tango77, SPOIL, NEOKINE, Tango129 or A259 protein. An antagonist of the FTHMA-070, Tango85, Tango77, SPOIL, NEOKINE, Tango129 or A259 protein can inhibit one or more of the activities of the naturally occurring form of the FTHMA-070, Tango85, Tango77, SPOIL, NEOKINE, Tango129 or A259 protein by, for example, competitively binding to a downstream or upstream member of a cellular signaling cascade which includes the FTHMA-070, Tango85, Tango77, SPOIL, NEOKINE, Tango129 or A259 protein. Thus, specific biological effects can be elicited by treatment with a variant of limited function. Treatment of a subject with a variant having a subset of the biological activities of the naturally occurring form of the protein can have fewer side effects in a subject relative to treatment with the naturally occurring form of the FTHMA-070, Tango85, Tango77, SPOIL, NEOKINE, Tango129 or A259 proteins.

[0764] In one embodiment, a SPOIL protein which acts as an IL-1 receptor antagonist can be converted into an IL-1 agonist by site specific mutagenesis. For example, the aspartic acid at amino acid residue 91 of SEQ ID NO:90 or amino acid residue 74 of SEQ ID NO:93, can be substituted with a lysine to create an IL-1 agonist. In a similar manner, the alanine at amino acid residue 162 of SEQ ID NO:102 or the alanine residue at amino acid residue 201 of SEQ ID NO:105 can be substituted with a lysine to create an IL-1 agonist. Exemplary methods of converting IL-1ra into an IL-1 agonist are set forth in Ju et al. (1991) Proc. Natl. Acad. Sci. USA 88:2658-2662.

[0765] Variants of the FTHMA-070, Tango85, Tango77, SPOIL, NEOKINE, Tango129 or A259 protein which function as either FTHMA-070, Tango85, Tango77, SPOIL, NEOKINE, Tango129 or A259 agonists (mimetics) or as FTHMA-070, Tango85, Tango77, SPOIL, NEOKINE, Tango129 or A259 antagonists can be identified by screening combinatorial libraries of mutants, e.g., truncation mutants, of the FTHMA-070, Tango85, Tango77, SPOIL, NEOKINE, Tango129 or A259 protein for FTHMA-070, Tango85, Tango77, SPOIL, NEOKINE, Tango129 or A259 protein agonist or antagonist activity. In one embodiment, a variegated library of FTHMA-070, Tango85, Tango77, SPOIL, NEOKINE, Tango129 or A259 variants is generated by combinatorial mutagenesis at the nucleic acid level and is encoded by a variegated gene library. A variegated library of FTHMA-070, Tango85, Tango77, SPOIL, NEOKINE, Tango129 or A259 variants can be produced by, for example, enzymatically ligating a mixture of synthetic oligonucleotides into gene sequences such that a degenerate set of potential FTHMA-070, Tango85, Tango77, SPOIL, NEOKINE, Tango129 or A259 sequences is expressible as individual polypeptides, or alternatively, as a set of larger fusion proteins (e.g., for phage display) containing the set of FTHMA-070, Tango85, Tango77, SPOIL, NEOKINE, Tango129 or A259 sequences therein. There are a variety of methods which can be used to produce libraries of potential FTHMA-070, Tango85, Tango77, SPOIL, NEOKINE, Tango129 or A259 variants from a degenerate oligonucleotide sequence. Chemical synthesis of a degenerate gene sequence can be performed in an automatic DNA synthesizer, and the synthetic gene then ligated into an appropriate expression vector. Use of a degenerate set of genes allows for the provision, in one mixture, of all of the sequences encoding the desired set of potential FTHMA-070, Tango85, Tango77, SPOIL, NEOKINE, Tango129 or A259 sequences. Methods for synthesizing degenerate oligonucleotides are known in the art (see, e.g., Narang (1983) Tetrahedron 39:3; Itakura et al. (1984) Annu. Rev. Biochem. 53:323; Itakura et al. (1984) Science 198:1056; Ike et al. (1983) Nucleic Acid Res. 11:477).

[0766] In addition, libraries of fragments of the FTHMA-070, Tango85, Tango77, SPOIL, NEOKINE, Tango129 or A259 protein coding sequence can be used to generate a variegated population of FTHMA-070, Tango85, Tango77, SPOIL, NEOKINE, Tango129 or A259 fragments for screening and subsequent selection of variants of a FTHMA-070, Tango85, Tango77, SPOIL, NEOKINE, Tango129 or A259 protein. In one embodiment, a library of coding sequence fragments can be generated by treating a double stranded PCR fragment of a FTHMA-070, Tango85, Tango77, SPOIL, NEOKINE, Tango129 or A259 coding sequence with a nuclease under conditions wherein nicking occurs only about once per molecule, denaturing the double stranded DNA, renaturing the DNA to form double stranded DNA which can include sense/antisense pairs from different nicked products, removing single stranded portions from reformed duplexes by treatment with S1 nuclease, and ligating the resulting fragment library into an expression vector. By this method, an expression library can be derived which encodes N-terminal and internal fragments of various sizes of the FTHMA-070, Tango85, Tango77, SPOIL, NEOKINE, Tango129 or A259 protein.

[0767] Several techniques are known in the art for screening gene products of combinatorial libraries made by point mutations or truncation, and for screening cDNA libraries for gene products having a selected property. Such techniques are adaptable for rapid screening of the gene libraries generated by the combinatorial mutagenesis of FTHMA-070, Tango85, Tango77, SPOIL, NEOKINE, Tango129 or A259 proteins. The most widely used techniques, which are amenable to high through-put analysis, for screening large gene libraries typically include cloning the gene library into replicable expression vectors, transforming appropriate cells with the resulting library of vectors, and expressing the combinatorial genes under conditions in which detection of a desired activity facilitates isolation of the vector encoding the gene whose product was detected. Recursive ensemble mutagenesis (REM), a technique which enhances the frequency of functional mutants in the libraries, can be used in combination with the screening assays to identify FTHMA-070, Tango85, Tango77, SPOIL, NEOKINE, Tango129 or A259 variants (Arkin and Yourvan (1992) Proc. Natl. Acad. Sci. USA 89:7811-7815; Delgrave et al. (1993) Protein Engineering 6(3):327-331).

[0768] In one embodiment, cell based assays can be exploited to analyze a variegated SPOIL library. For example, a library of expression vectors can be transfected into a cell line which ordinarily responds to a particular ligand in a SPOIL-dependent manner. The transfected cells are then contacted with the ligand and the effect of expression of the mutant on signaling by the ligand can be detected, e.g., by measuring any of a number of immune cell responses. Plasmid DNA can then be recovered from the cells which score for inhibition, or alternatively, potentiation of ligand induction, and the individual clones further characterized.

[0769] In one embodiment, cell based assays can be exploited to analyze a variegated NEOKINE library. For example, a library of expression vectors can be transfected into a cell line which ordinarily responds to a particular ligand in a NEOKINE-dependent manner. The transfected cells are then contacted with the ligand and the effect of expression of the mutant on signaling by the ligand can be detected, e.g., by measuring any of a number of inflammatory or angiogenic responses. Plasmid DNA can then be recovered from the cells which score for inhibition, or alternatively, potentiation of ligand induction, and the individual clones further characterized.

[0770] An isolated FTHMA-070, Tango85, Tango77, SPOIL, NEOKINE, Tango129 or A259 protein, or a portion or fragment thereof, can be used as an immunogen to generate antibodies that bind FTHMA-070, Tango85, Tango77, SPOIL, NEOKINE, Tango129 or A259 using standard techniques for polyclonal and monoclonal antibody preparation. The full-length FTHMA-070, Tango85, Tango77, SPOIL, NEOKINE, Tango129 or A259 protein can be used or, alternatively, the invention provides antigenic peptide fragments of FTHMA-070, Tango85, Tango77, SPOIL, NEOKINE, Tango129 or A259 for use as immunogens.

[0771] The antigenic peptide of FTHMA-070 or T85 comprises at least 8 (preferably 10, 15, 20, or 30) amino acid residues of the amino acid sequence shown in SEQ ID NO:54 and encompasses an epitope of FTHMA-070 or T85 such that an antibody raised against the peptide forms a specific immune complex with FTHMA-070 or T85. Preferred epitopes encompassed by the antigenic peptide are regions of FTHMA-070 or T85 that are located on the surface of the protein, e.g., hydrophilic regions.

[0772] The antigenic peptide of Tango-77 comprises at least 8 (preferably 10, 15, 20, or 30) amino acid residues of the amino acid sequence shown in SEQ ID NO:72, SEQ ID NO:75, SEQ ID NO:77, SEQ ID NO:79, SEQ ID NO:81 or SEQ ID NO:83 and encompasses an epitope of Tango-77 such that an antibody raised against the peptide forms a specific immune complex with Tango-77.

[0773] The antigenic peptide of SPOIL comprises at least 8 amino acid residues of the amino acid sequence shown in SEQ ID NO:90, SEQ ID NO:102, SEQ ID NO:105, SEQ ID NO:113, the amino acid sequence encoded by the DNA insert of the plasmid deposited with ATCC as Accession Number 98883, or the amino acid sequence encoded by the DNA insert of the plasmid deposited with ATCC as Accession Number 98984, and encompasses an epitope of SPOIL such that an antibody raised against the peptide forms a specific immune complex with SPOIL. Preferably, the antigenic peptide comprises at least 10 amino acid residues, more preferably at least 15 amino acid residues, even more preferably at least 20 amino acid residues, and most preferably at least 30 amino acid residues.

[0774] The antigenic peptide of NEOKINE comprises at least 8 amino acid residues of the amino acid sequence shown in SEQ ID NO:116, SEQ ID NO:119, SEQ ID NO:122, or SEQ ID NO:125 and encompasses an epitope of NEOKINE such that an antibody raised against the peptide forms a specific immune complex with NEOKINE. Preferably, the antigenic peptide comprises at least 10 amino acid residues, more preferably at least 15 amino acid residues, even more preferably at least 20 amino acid residues, and most preferably at least 30 amino acid residues. Preferred epitopes encompassed by the antigenic peptide are regions of NEOKINE that are located on the surface of the protein, e.g., hydrophilic regions.

[0775] The antigenic peptide of T129 comprises at least 8 (preferably 10, 15, 20, or 30) amino acid residues of the amino acid sequence shown in SEQ ID NO:138 and encompasses an epitope of T129 such that an antibody raised against the peptide forms a specific immune complex with T129.

[0776] The antigenic peptide of a259 comprises at least 8 (preferably 10, 15, 20, or 30) amino acid residues of the amino acid sequence of SEQ ID NO:147 or 165, and encompasses an epitope of the protein such that an antibody raised against the peptide forms a specific immune complex with the protein.

[0777] Preferred epitopes encompassed by the antigenic peptide are regions of T129 that are located on the surface of the protein, e.g., hydrophilic regions. A hydrophobicity analysis of the human T129 protein sequence indicates that the regions between, e.g., amino acids 120 and 130, between amino acids 140 and 160, and between amino acids 400 and 420 of SEQ ID NO:2 are particularly hydrophilic and, therefore, are likely to encode surface residues useful for targeting antibody production.

[0778] T129 immunogen typically is used to prepare antibodies by immunizing a suitable subject, (e.g., rabbit, goat, mouse or other mammal) with the immunogen. An appropriate immunogenic preparation can contain, for example, recombinantly expressed T129 protein or a chemically synthesized T129 polypeptide. The preparation can further include an adjuvant, such as Freund's complete or incomplete adjuvant, or similar immunostimulatory agent. Immunization of a suitable subject with an immunogenic T129 preparation induces a polyclonal anti-T129 antibody response.

[0779] Preferred epitopes encompassed by the antigenic peptide are regions that are located on the surface of the A259 protein, e.g., hydrophilic regions. FIGS. 10 and 11 are hydropathy plots of the proteins of the invention. These plots or similar analyses can be used to identify hydrophilic regions.

[0780] A FTHMA-070, Tango85, Tango77, SPOIL, NEOKINE, Tango129 or A259 immunogen typically is used to prepare antibodies by immunizing a suitable subject, (e.g., rabbit, goat, mouse or other mammal) with the immunogen. An appropriate immunogenic preparation can contain, for example, recombinantly expressed FTHMA-070, Tango85, Tango77, SPOIL, NEOKINE, Tango129 or A259 protein or a chemically synthesized FTHMA-070, Tango85, Tango77, SPOIL, NEOKINE, Tango129 or A259 polypeptide. The preparation can further include an adjuvant, such as Freund's complete or incomplete adjuvant, or similar immunostimulatory agent. Immunization of a suitable subject with an immunogenic FTHMA-070, Tango85, Tango77, SPOIL, NEOKINE, Tango129 or A259 preparation induces a polyclonal anti-FTHMA-070, Tango85, Tango77, SPOIL, NEOKINE, Tango129 or A259 antibody response.

[0781] Accordingly, another aspect of the invention pertains to anti-FTHMA-070, Tango85, Tango77, SPOIL, NEOKINE, Tango129 or A259 antibodies. The term “antibody” as used herein refers to immunoglobulin molecules and immunologically active portions of immunoglobulin molecules, i.e., molecules that contain an antigen binding site which specifically binds an antigen, such as FTHMA-070, Tango85, Tango77, SPOIL, NEOKINE, Tango129 or A259. A molecule which specifically binds to FTHMA-070, Tango85, Tango77, SPOIL, NEOKINE, Tango129 or A259 is a molecule which binds FTHMA-070, Tango85, Tango77, SPOIL, NEOKINE, Tango129 or A259, but does not substantially bind other molecules in a sample, e.g., a biological sample, which naturally contains FTHMA-070, Tango85, Tango77, SPOIL, NEOKINE, Tango129 or A259. Examples of immunologically active portions of immunoglobulin molecules include F(ab) and F(ab′)₂ fragments which can be generated by treating the antibody with an enzyme such as pepsin. The invention provides polyclonal and monoclonal antibodies that bind FTHMA-070, Tango85, Tango77, SPOIL, NEOKINE, Tango129 or A259. The term “monoclonal antibody” or “monoclonal antibody composition”, as used herein, refers to a population of antibody molecules that contain only one species of an antigen binding site capable of immunoreacting with a particular epitope of FTHMA-070, Tango85, Tango77, SPOIL, NEOKINE, Tango129 or A259. A monoclonal antibody composition thus typically displays a single binding affinity for a particular FTHMA-070, Tango85, Tango77, SPOIL, NEOKINE, Tango129 or A259 protein with which it immunoreacts.

[0782] Polyclonal anti-FTHMA-070, Tango85, Tango77, SPOIL, NEOKINE, Tango129 or A259 antibodies can be prepared as described above by immunizing a suitable subject with a FTHMA-070, Tango85, Tango77, SPOIL, NEOKINE, Tango129 or A259 immunogen. The anti-FTHMA-070, Tango85, Tango77, SPOIL, NEOKINE, Tango129 or A259 antibody titer in the immunized subject can be monitored over time by standard techniques, such as with an enzyme linked immunosorbent assay (ELISA) using immobilized FTHMA-070, Tango85, Tango77, SPOIL, NEOKINE, Tango129 or A259. If desired, the antibody molecules directed against FTHMA-070, Tango85, Tango77, SPOIL, NEOKINE, Tango129 or A259 can be isolated from the mammal (e.g., from the blood) and further purified by well-known techniques, such as protein A chromatography to obtain the IgG fraction. At an appropriate time after immunization, e.g., when the anti-FTHMA-070, Tango85, Tango77, SPOIL, NEOKINE, Tango129 or A259 antibody titers are highest, antibody-producing cells can be obtained from the subject and used to prepare monoclonal antibodies by standard techniques, such as the hybridoma technique originally described by Kohler and Milstein (1975) Nature 256:495-497, the human B cell hybridoma technique (Kozbor et al. (1983) Immunol Today 4:72), the EBV-hybridoma technique (Cole et al. (1985), Monoclonal Antibodies and Cancer Therapy, Alan R. Liss, Inc., pp. 77-96) or trioma techniques. The technology for producing various antibodies monoclonal antibody hybridomas is well known (see generally Current Protocols in Immunology (1994) Coligan et al. (eds.) John Wiley & Sons, Inc., New York, N.Y.). Briefly, an immortal cell line (typically a myeloma) is fused to lymphocytes (typically splenocytes) from a mammal immunized with a FTHMA-070, Tango85, Tango77, SPOIL, NEOKINE, Tango129 or A259 immunogen as described above, and the culture supernatants of the resulting hybridoma cells are screened to identify a hybridoma producing a monoclonal antibody that binds FTHMA-070, Tango85, Tango77, SPOIL, NEOKINE, Tango129 or A259.

[0783] Any of the many well known protocols used for fusing lymphocytes and immortalized cell lines can be applied for the purpose of generating an anti-FTHMA-070, Tango85, Tango77, SPOIL, NEOKINE, Tango129 or A259 monoclonal antibody (see, e.g., Current Protocols in Immunology, supra; Galfre et al. (1977) Nature 266:55052; R. H. Kenneth, in Monoclonal Antibodies: A New Dimension In Biological Analyses, Plenum Publishing Corp., New York, N.Y. (1980); and Lerner (1981) Yale J. Biol. Med., 54:387-402. Moreover, the ordinarily skilled worker will appreciate that there are many variations of such methods which also would be useful. Typically, the immortal cell line (e.g., a myeloma cell line) is derived from the same mammalian species as the lymphocytes. For example, murine hybridomas can be made by fusing lymphocytes from a mouse immunized with an immunogenic preparation of the present invention with an immortalized mouse cell line, e.g., a myeloma cell line that is sensitive to culture medium containing hypoxanthine, aminopterin and thymidine (“HAT medium”). Any of a number of myeloma cell lines can be used as a fusion partner according to standard techniques, e.g., the P3-NS1/1-Ag4-1, P3-x63-Ag8.653 or Sp2/O-Ag14 myeloma lines. These myeloma lines are available from ATCC. Typically, HAT-sensitive mouse myeloma cells are fused to mouse splenocytes using polyethylene glycol (“PEG”). Hybridoma cells resulting from the fusion are then selected using HAT medium, which kills unfused and unproductively fused myeloma cells (unfused splenocytes die after several days because they are not transformed). Hybridoma cells producing a monoclonal antibody of the invention are detected by screening the hybridoma culture supernatants for antibodies that bind FTHMA-070, Tango85, Tango77, SPOIL, NEOKINE, Tango129 or A259, e.g., using a standard ELISA assay.

[0784] Alternative to preparing monoclonal antibody-secreting hybridomas, a monoclonal anti-FTHMA-070, Tango85, Tango77, SPOIL, NEOKINE, Tango129 or A259 antibody can be identified and isolated by screening a recombinant combinatorial immunoglobulin library (e.g., an antibody phage display library) with FTHMA-070, Tango85, Tango77, SPOIL, NEOKINE, Tango129 or A259 to thereby isolate immunoglobulin library members that bind FTHMA-070, Tango85, Tango77, SPOIL, NEOKINE, Tango129 or A259. Kits for generating and screening phage display libraries are commercially available (e.g., the Pharmacia Recombinant Phage Antibody System, Catalog No. 27-9400-01; and the Stratagene SurfZAP™ Phage Display Kit, Catalog No. 240612). Additionally, examples of methods and reagents particularly amenable for use in generating and screening antibody display library can be found in, for example, U.S. Pat. No. 5,223,409; PCT Publication No. WO 92/18619; PCT Publication No. WO 91/17271; PCT Publication WO 92/20791; PCT Publication No. WO 92/15679; PCT Publication WO 93/01288; PCT Publication No. WO 92/01047; PCT Publication No. WO 92/09690; PCT Publication No. WO 90/02809; Fuchs et al. (1991) Bio/Technology 9:1370-1372; Hay et al. (1992) Hum. Antibod. Hybridomas 3:81-85; Huse et al. (1989) Science 246:1275-1281; Griffiths et al. (1993) EMBO J. 12:725-734.

[0785] Additionally, recombinant anti-FTHMA-070, Tango85, Tango77, SPOIL, NEOKINE, Tango129 or A259 antibodies, such as chimeric and humanized monoclonal antibodies, comprising both human and non-human portions, which can be made using standard recombinant DNA techniques, are within the scope of the invention. Such chimeric and humanized monoclonal antibodies can be produced by recombinant DNA techniques known in the art, for example using methods described in PCT Application No. PCT/US86/02269; European Patent Application 184,187; European Patent Application 171,496; European Patent Application 173,494; PCT Publication No. WO 86/01533; U.S. Pat. No. 4,816,567; European Patent Application 125,023; Better et al. (1988) Science 240:1041-1043; Liu et al. (1987) Proc. Natl. Acad. Sci. USA 84:3439-3443; Liu et al. (1987) J. Immunol. 139:3521-3526; Sun et al. (1987) Proc. Natl. Acad. Sci. USA 84:214-218; Nishimura et al. (1987) Canc. Res. 47:999-1005; Wood et al. (1985) Nature 314:446-449; and Shaw et al. (1988) J. Natl. Cancer Inst. 80:1553-1559); Morrison, (1985) Science 229:1202-1207; Oi et al. (1986) Bio/Techniques 4:214; U.S. Pat. No. 5,225,539; Jones et al. (1986) Nature 321:552-525; Verhoeyan et al. (1988) Science 239:1534; and Beidler et al. (1988) J. Immunol. 141:4053-4060.

[0786] Completely human antibodies are particularly desirable for therapeutic treatment of human patients. Such antibodies can be produced using transgenic mice which are incapable of expressing endogenous immunoglobulin heavy and light chains genes, but which can express human heavy and light chain genes. The transgenic mice are immunized in the normal fashion with a selected antigen, e.g., all or a portion of Tango-77 or A259. Monoclonal antibodies directed against the antigen can be obtained using conventional hybridoma technology. The human immunoglobulin transgenes harbored by the transgenic mice rearrange during B cell differentiation, and subsequently undergo class switching and somatic mutation. Thus, using such a technique, it is possible to produce therapeutically useful IgG, IgA and IgE antibodies. For an overview of this technology for producing human antibodies, see Lonberg and Huszar (1995, Int. Rev. Immunol. 13:65-93). For a detailed discussion of this technology for producing human antibodies and human monoclonal antibodies and protocols for producing such antibodies, see, e.g., U.S. Pat. No. 5,625,126; U.S. Pat. No. 5,633,425; U.S. Pat. No. 5,569,825; U.S. Pat. No. 5,661,016; and U.S. Pat. No. 5,545,806. In addition, companies such as Abgenix, Inc. (Freemont, Calif.), can be engaged to provide human antibodies directed against a selected antigen using technology similar to the described above.

[0787] Completely human antibodies which recognize a selected epitope can be generated using a technique referred to as “guided selection.” In this approach a selected non-human monoclonal antibody, e.g., a murine antibody, is used to guide the selection of a completely human antibody recognizing the same epitope.

[0788] First, a non-human monoclonal antibody which binds a selected antigen (epitope), e.g., an antibody which inhibits Tango-77 or A259 activity, is identified. The heave chain and the light chain of the non-human antibody are cloned and used to create phage display Fab fragments. For example, the heave chain gene can be cloned into a plasmid vector so that the heavy chain can be secreted from bacteria. The light chain gene can be cloned into a phage coat protein gene so that the light chain can be expressed on the surface of phage. A repertoire (random collection) of human light chains fused to phage is used to infect the bacteria which express the non-human heavy chain. The resulting progeny phage display hybrid antibodies (human light chain/non-human heavy chain). The selected antigen is used in a panning screen to select phage which bind the selected antigen. Several rounds of selection may be required to identify such phage. Next, human light chain genes are isolated from the selected phage which bind the selected antigen. These selected human light chain genes are then used to guide the selection of human heavy chain genes as follows. The selected human light chain genes are inserted into vectors for expression by bacteria. Bacteria expressing the selected human light chains are infected with a repertoire of human heavy chains fused to phage. The resulting progeny phage display human antibodies (human light chain/human heavy chain).

[0789] Next, the selected antigen is used in a panning screen to select phage which bind the selected antigen. The phage selected in this step display completely human antibody which recognize the same epitope recognized by the original selected, non-human monoclonal antibody. The genes encoding both the heavy and light chains are readily isolated and be further manipulated for production of human antibody. This technology is described by Jespers et al. (1994, Bio/technology 12:899-903).

[0790] An anti-FTHMA-070, Tango85, Tango77, SPOIL, NEOKINE, Tango129 or A259 antibody (e.g.; monoclonal antibody) can be used to isolate FTHMA-070, Tango85, Tango77, SPOIL, NEOKINE, Tango129 or A259 by standard techniques, such as affinity chromatography or immunoprecipitation. An anti-FTHMA-070, Tango85, Tango77, SPOIL, NEOKINE, Tango129 or A259 antibody can facilitate the purification of natural FTHMA-070, Tango85, Tango77, SPOIL, NEOKINE, Tango129 or A259 from cells and of recombinantly produced FTHMA-070, Tango85, Tango77, SPOIL, NEOKINE, Tango129 or A259 expressed in host cells. Moreover, an anti-FTHMA-070, Tango85, Tango77, SPOIL, NEOKINE, Tango129 or A259 antibody can be used to detect FTHMA-070, Tango85, Tango77, SPOIL, NEOKINE, Tango129 or A259 protein (e.g., in a cellular lysate or cell supernatant) in order to evaluate the abundance and pattern of expression of the FTHMA-070, Tango85, Tango77, SPOIL, NEOKINE, Tango129 or A259 protein. Anti-FTHMA-070, Tango85, Tango77, SPOIL, NEOKINE, Tango129 or A259 antibodies can be used diagnostically to monitor protein levels in tissue as part of a clinical testing procedure, e.g., to, for example, determine the efficacy of a given treatment regimen. Detection can be facilitated by coupling the antibody to a detectable substance. Examples of detectable substances include various enzymes, prosthetic groups, fluorescent materials, luminescent materials, bioluminescent materials, and radioactive materials. Examples of suitable enzymes include horseradish peroxidase, alkaline phosphatase, β-galactosidase, or acetylcholinesterase; examples of suitable prosthetic group complexes include streptavidin/biotin and avidin/biotin; examples of suitable fluorescent materials include umbelliferone, fluorescein, fluorescein isothiocyanate, rhodamine, dichlorotriazinylamine fluorescein, dansyl chloride or phycoerythrin; an example of a luminescent material includes luminol; examples of bioluminescent materials include luciferase, luciferin, and aequorin, and examples of suitable radioactive material include ¹²⁵I, ¹³¹I, ³⁵S or ³H.

### Delta3 Methods of Treating Disease

[0791] Based at least in part on the fact that the Notch signaling pathway has been implicated in development of the nervous system, in particular in regulating neuronal differentiation and vasculature, e.g., CNS vasculature, a wide variety of pathological diseases or conditions can benefit from treatment with Delta3 nucleic acids, proteins, and modulators thereof. In particular, based at least in part on the observation that PS1 and PS2, genes encoding amyloid precursor proteins, which are mutated in about 10% of cases of Alzheimer's disease, are functionally linked to the Notch signaling pathway, mutations in genes of the Notch signaling pathway, e.g., Delta genes, could also result in Alzheimer's disease or other neurodegenerative or neuro-developmental diseases. The Notch signaling pathway plays a role in the development of vasculature. For example, loss of DII1 function mutants become severally hemorrhagic after embryonic day 10. Furthermore, mutations in Notch3 result in CADASIL, a disease characterized by stroke. In addition, mice with a functionally ablated PS1 gene exhibit hemorrhages in the brain and/or spinal cord after embryonic day 11.5 (Wong et al. (1997) Nature 387:288). In addition, the Notch pathway has been implicated in hematologic development. Specifically, molecules in the Notch signaling pathway have been shown to be expressed in a wide variety of blood cells, including but not limited to those of myeloid and lymphoid origins. Notch-1 was shown to play a role in T-cell development. Furthermore, since the Notch signaling pathway is involved in cell fate determination at least in the nervous system, immune system and endothelial system, it is likely that the Notch signaling pathway, and in particular Delta3 is involved in cell fate determination in additional biological systems. Accordingly, the invention also provides methods for treating diseases or disorders arising from an abnormal cell proliferation and/or differentiation of cells other than cells from the nervous system, immune system, and vasculature.

[0792] Among the disorders that can be treated or prevented according to the methods of the invention include pathological neurogenic, neoplastic or hyperplastic conditions. Neurologic diseases, e.g., neurodegenerative, neuro-differentiative and neuro-developmental diseases, that might benefit from this methodology include, but are not limited to neuropathies, e.g., peripheral neuropathy such as ACCPN, stroke, dementia, e.g., cerebral autosomal dominant arteriopathy with subcortical infarcts and leukoencephalopathy (CADASIL), degenerative lesions (Parkinson's disease, Alzheimer's disease, Huntington's chorea, amyotrophic lateral sclerosis, spinocerebellar degenerations), demyelating diseases (multiple sclerosis, human immunodeficiency associated myelopathy, transverse myelopathy, progressive multifocal leukoencephalopathy, pontine myelinolysis), motor neuron injuries, progressive spinal muscular atrophy, progressive bulbar palsy, primary lateral sclerosis, infantile and juvenile muscular atrophy, progressive bulbar paralysis of childhood (Fazio-Londe syndrome), poliomyelitis, and hereditary motorsensory neuropathy (Charcot-Marie-Tooth disease), spinal cord injuries, brain injuries, lesions associated with surgery, ischemic lesions, malignant lesions, infectious lesions.

[0793] Additional neurological diseases that can be treated according to the method of the invention include neuropathies, e.g., peripheral neuropathies, e.g., Agenesis of the Corpus Callosum with Peripheral Neuropathy (ACCPN). In fact, as set forth in the examples presented below, hDelta3 has been mapped to human chromosome 15 close to framework markers D15S1244 and D15S144, a chromosomal region which has been shown to be genetically linked (ACCPN) (Casaubon et al. (1996) Am J. Hum. Genet. 58:28). The disease is characterized by a progressive peripheral neuropathy caused by axonal degeneration and a central nervous system (CNS) malformation characterized by the absence of hypoplasia of the corpus callosum. The disorder appears early in life, is progressive and results in death in the third decade of life of the subject.

[0794] Neuropathies refer to disorders of peripheral nerves and includes both motor and sensory functions, since most motor and sensory axons run in the same nerves. Neurophathies may be either chronic or acute. One example of a acute neuropathy is the Guillain-Barre syndrome, which often follow respiratory infection. Chronic neuropathies include, e.g., acute intermittent porphyria, Charcot-Marie-Tooth disease, metabolic diseases such as diabetes, obesity, and B12 deficiency, intoxication, nutritional disorders.

[0795] Disorders of the vasculature, also termed “vascular disorders”, in addition to CADASIL and stroke, that can be treated or prevented according to the methods of the invention include atheroma, tumor angiogenesis, wound healing, diabetic retinopathy, hemangioma, psoriasis, and restenosis, e.g., restenosis resulting from balloon angioplasty.

[0796] In one embodiment, diseases or disorders caused or contributed to by aberrant Delta3 activity, such as aberrant Delta3 protein levels or an aberrant biological activity or which are associated with one or more specific Delta3 alleles, e.g., a mutant Delta3 allele, can be treated with Delta3 therapeutics. Aberrant protein levels can be caused, e.g., by aberrant gene expression. Such aberrant activity can result, for example, in aberrant cell proliferation and/or differentiation or cell death. For example, aberrant Delta3 activity in a subject can result in increased proliferation of certain cells in the subject. Subjects having a disorder characterized by abnormal cell proliferation can be treated by administration of a Delta3 therapeutic inhibiting or decreasing such proliferation. The specific Delta3 therapeutic used may vary depending on the type of the cell that is proliferating aberrantly. The appropriate Delta3 therapeutic to use can be determined, e.g., by in vitro culture of a sample of such cells which can be obtained from the subject, in the presence and in the absence of Delta3 therapeutics.

[0797] Diseases or conditions associated with aberrant cell proliferation which can be treated or prevented with Delta3 therapeutics include cancers, malignant conditions, premalignant conditions, benign conditions. The condition to be treated or prevented can be a solid tumor, such as a tumor arising in an epithelial tissue. For example, the cancer can be colon or cervix cancer. Cancer of the colon and cervix have in fact been found to have increased levels of expression of Notch as compared to normal tissue (PCT Publication No. WO/07474, Apr. 14, 1994). Accordingly, treatment of such a cancer could comprise administration to the subject of a Delta3 therapeutic decreasing the interaction of Notch with Delta3. Other cancers that can be treated or prevented with a Delta3 protein include sarcomas and carcinomas, e.g., lung cancer, cancer of the esophagus, lung cancer, melanoma, seminoma, and squamous adenocarcinoma. Additional solid tumors within the scope of the invention include those that can be found in a medical textbook. The condition to be treated or prevented can also be a soluble tumor, such as leukemia, either chronic or acute, including chronic or acute myelogenous leukemia, chronic or acute lymphocytic leukemia, promyelocytic leukemia, monocytic leukemia, myelomonocytic leukemia, and erythroleukemia. Yet other proliferative disorders that can be treated with a Delta3 therapeutic of the invention include heavy chain disease, multiple myeloma, lymphoma, e.g., Hodgkin's lymphoma and non-Hodgkin's lymphoma, Waldenstroem's macroglobulemia, and fibroproliferative disorders, particularly of cerebravascular tissue.

[0798] Diseases or conditions characterized by a solid or soluble tumor can be treated by administrating a Delta3 therapeutic either locally or systemically, such that proliferation of the cells having an aberrant proliferation is inhibited or decreased. Methods for administering the compounds of the invention are further described below.

[0799] The invention also provides methods for preventing the formation and/or development of tumors. For example, the development of a tumor can be preceded by the presence of a specific lesion, such as a pre-neoplastic lesion, e.g., hyperplasia, metaplasia, and dysplasia. Such lesions can be found, e.g., in epithelial tissue. Thus, the invention provides a method for inhibiting progression of such a lesion into a neoplastic lesion, comprising administering to the subject having a preneoplastic lesion a amount of a Delta3 therapeutic sufficient to inhibit progression of the preneoplastic lesion into a neoplastic lesion.

[0800] In a preferred embodiment, the invention provides a method for inhibiting endothelial cell proliferation and/or differentiation, comprising contacting a Delta3 therapeutic with a tissue in which endothelial cells are proliferating, such as a developing tumor or a hyperproliferative disease, i.e., a disease associated with abnormal cellular proliferation. Blocking the proliferation of endothelial cells will result in inhibition of development of endothelium and blood vessels, thus limiting access to the tumor of compounds necessary for tumor development.

[0801] The invention also provides for methods for treating or preventing diseases or conditions associated with insufficient cell proliferation. For example, Delta3 therapeutics can be used to stimulate tissue repair, regeneration, and/or wound healing, e.g., of neural tissue, such as after surgery or to stimulate tissue healing from burns. Other disease in which proliferation of cells is desired are hypoproliferative diseases, i.e., diseases characterized by an abnormally low proliferation of certain cells.

[0802] In yet another embodiment, the invention provides a method for treating or preventing diseases or conditions characterized by aberrant cell differentiation. Accordingly, the invention provides methods for stimulating cellular differentiation in conditions characterized by an inhibition of normal cell differentiation which may or may not be accompanied by excessive proliferation. Alternatively, Delta3 therapeutics can be used to inhibit differentiation of specific cells.

[0803] In one method, the aberrantly proliferating and/or differentiating cell is a cell present in the nervous system. Accordingly, the invention provides methods for treating diseases or conditions associated with a central or peripheral nervous system. For example, the invention provides methods for treating lesions of the nervous system involving an aberrant Delta3 activity in neurons, in Schwann cells, glial cells, or other types of neural cells. Disorders of the nervous system are set forth above.

[0804] In another embodiment, a Delta3 therapeutic can be utilized to ameliorate a symptom of obesity and/or disorders that accompany or are exacerbated by an obese state, such as cardiovascular and circulatory disorders, metabolic abnormalities typical of obesity, such as hyperinsulinemia, insulin resistance, diabetes, including non-insulin dependent diabetes mellitus (NIDDM), insulin dependent diabetes mellitus (IDDM), and maturity onset diabetes of the young (MODY), disorders of energy homeostasis, disorders associated with lipid metabolism, such as cachexia.

[0805] With respect to cardiovascular disorders, symptoms of coronary diseases (e.g., cardiovascular diseases including unstable angina pectoris, myocardial infarction, acute myocardial infarction, coronary artery disease, coronary revascularization, coronary restenosis, ventricular thromboembolism, atherosclerosis, coronary artery disease (e.g., arterial occlusive disorders), plaque formation, cardiac ischemia, including complications related to coronary procedures, such as percutaneous coronary artery angioplasty (balloon angioplasty) procedures) can be ameliorated. With respect to coronary procedures, such modulation can be achieved via administration of Delta3 therapeutics prior to, during, or subsequent to the procedure.

[0806] Delta3 therapeutics (e.g., nucleic acids, proteins and modulators thereof) can, therefore, be used to modulate disorders resulting from any blood vessel insult that can result in platelet aggregation. Such blood vessel insults include, but are not limited to, vessel wall injury, such as vessel injuries that result in a highly thrombogenic surface exposed within an otherwise intact blood vessel e.g., vessel wall injuries that result in release of ADP, thrombin and/or epinephrine, fluid shear stress that occurs at the site of vessel narrowing, ruptures and/or tears at the sites of atherosclerotic plaques, and injury resulting from balloon angioplasty or atherectomy. Preferably, such therapeutics do not effect initial platelet adhesion to vessel surfaces, or effect such adhesion to a relatively lesser extent than the effect on platelet-platelet aggregation, e.g., unregulated platelet-platelet aggregation, following the initial platelet adhesion.

[0807] In addition, Delta3 therapeutics can be utilized to amieliorate a symptom of disorders associated with abnormal vasculogenesis (e.g., cancers, including, but not limited to, cancers of the epithelia (e.g., carcinomas of the pancreas, stomach, liver, secretory glands (e.g., adenocarcinoma), bladder, lung, breast, skin (e.g., fibromatosis or malignant melanoma), reproductive tract including prostate gland, ovary, cervix and uterus); cancers of the hematopoietic and immune system (e.g., leukemias and lymphomas); cancers of the central nervous, brain system and eye (e.g., gliomas, neuroblastoma and retinoblastoma); and cancers of connective tissues, bone, muscles and vasculature (e.g., hemangiomas and sarcomas)), disorders related to fetal development, in particular, disorders involving development of lung and kidney, lung-related disorders, and immune-related disorders, such as inflammatory-related disorders, e.g., asthma, allergy, and autoimmune disorders, as well as neurological disorders, including developmental, cognitive and personality-related disorders, renal disorders, adrenal gland-related disorders; and disorders relating to skeletal muscle, such as dystrophic disorders.

[0808] With respect to immune disorders, Delta3 therapeutics (e.g., nucleic acids, proteins and modulators thereof) can be utilized to modulate processes involved in lymphocyte development, differentiation and activity, including, but not limited to development, differentiation and activation of T cells, including T helper, T cytotoxic and non-specific T killer cell types and subtypes, and B cells, immune functions associated with such cells, and amelioration of one or more symptoms associated with abnormal function of such cell types. Such disorders can include, but are not limited to, autoimmune disorders, such as organ specific autoimmune disorders, e.g., autoimmune thyroiditis, Type I diabetes mellitus, insulin-resistant diabetes, autoimmune anemia, multiple sclerosis, and/or systemic autoimmune disorders, e.g., rheumatoid arthritis, lupus or sclerodoma, allergy, including allergic rhinitis and food allergies, asthma, psoriasis, graft rejection, transplantation rejection, graft versus host disease, pathogenic susceptibilities, e.g., susceptibility to certain bacterial or viral pathogens, wound healing and inflammatory reactions.

[0809] With respect to skeletal muscle-related disorders, Delta3 therapeutics can be utilized to ameliorate symptoms of disorders including, for example, muscular dystrophy disorders, e.g., Duchenne's muscular dystrophy and X-linked recessive Emery-Dreifuss dystrophy (EDMD), as well as developmental and other disorders that involve skeletal muscle such as, for example, oculofacial-skeletal myorhythmias, sarcoidosis, and malignant hyperthermia susceptibility (MHS).

[0810] With respect to lung disorders, Delta3 therapeutics can be utilized, for exampe, to ameliorate a symptom of such pulmonary disorders, such as atelectasis, pulmonary congestion or edema, chronic obstructive airway disease (e.g., emphysema, chronic bronchitis, bronchial asthma, and bronchiectasis), diffuse interstitial diseases (e.g., sarcoidosis, pneumoconiosis, hypersensitivity pneumonitis, Goodpasture's syndrome, idiopathic pulmonary hemosiderosis, pulmonary alveolar proteinosis, desquamative interstitial pneumonitis, chronic interstitial pneumonia, fibrosing alveolitis, hamman-rich syndrome, pulmonary eosinophilia, diffuse interstitial fibrosis, Wegener's granulomatosis, lymphomatoid granulomatosis, and lipid pneumonia), or tumors (e.g., bronchogenic carcinoma, bronchiolovlveolar carcinoma, bronchial carcinoid, hamartoma, and mesenchymal tumors).

[0811] In another embodiment, the invention provides a method for enhancing the survival and/or stimulating proliferation and/or differentiation of cells and tissues in vitro. For example, tissues from a subject can be obtained and grown in vitro in the presence of a Delta3 therapeutic, such that the tissue cells are stimulated to proliferate and/or differentiate. The tissue can then be readministered to the subject.

[0812] In another embodiment, as Notch can function to maintain cells in an immature state in vitro, i.e., as stem cells, e.g., the invention provides a method to expand the pool of hematopoietic stem cells through the interaction of Delta3 with Notch, which can be utilized in cases where it is desirable to do so including, but not limited to preparing cells harvested for subsequent bone marrow transplantation. Thus, Delta 3 can be utilized in stem cell preservation, that is, can be utilized to preserve stem cells in an immature, undifferentiated state, and/or preserving the stem cells' pluripotency, differentiation potential and proliferation potential. In one embodiment of such a stem cell preservation method, stem cells are contacted with cells expressing Delta3 and exhibiting Delta3 on their cell surfaces. Such Delta3-expressing cells can be presented, e.g., as stromal cells in culture.

[0813] In another embodiment, stem cells are contacted with full-length or soluble Delta3 attached to a solid surface, e.g., a culture plate, or microbeads.

[0814] In another embodiment, techniques such as that described above for stem cell preservation can be utilized to prevent death of CD4⁺/CD8⁺ T cells. Thus, such techniques can be used to repopulate peripheral T cell populations (e.g., as part of a leukemia therapy), or, and alternatively, can be used to produce and screen for an antigen-specific T cell clone.

[0815] In another embodiment, the invention can function as a method to determine the fate of T cells in the developing thymus. Antagonists or antagonists of hDelta3 activity can determine whether a T cell will develop the CD4 or CD8 phenotype and thus be useful as a therapeutic agent in immunodeficiency disorders, such as, but not limited to AIDS.

[0816] In another embodiment, as the Notch signaling pathway has been shown to be involved in eye development in Drosophila, and given the fact that mDelta3 was highly expressed in the developing mouse eye, Delta3 nucleic acids, proteins, and modulators thereof and/or agonists and antagonists can be used as therapeutics in such eye disorders as diabetic retinopathy, characterized by a hyper-proliferation of capillaries in the retina.

[0817] Since, in some cases, genes may be upregulated in a disease state and in other cases may be down-regulated, it will be desirable to activate and/or potentiate or suppress and/or down-modulate Delta3 activity depending on the condition to be treated using the techniques compounds and methods described herein. Some genes may be under-expressed in certain disease states. The activity of Delta3 nucleic acids, proteins, and modulators thereof may be in some way impaired, leading to the development of neurodegenerative disease symptoms. Such down-regulation of Delta3 gene expression or decrease in the activity of a Delta3 protein may have a causative or exacerbating effect on the disease state.

[0818] Among the approaches which may be used to ameliorate disease symptoms involving the misexpression of a Delta3 gene are, for example, antisense, ribozyme, and triple helix molecules described above. Compounds that compete with Delta3 nucleic acids, proteins, and modulators thereof for binding to upstream or downstream elements in a Delta/Notch signaling cascade will antagonize Delta3 nucleic acids, proteins, and modulators thereof, thereby inducing a therapeutic effect. Examples of suitable compounds include the antagonists or homologs described in detail above. In other instances, the increased expression or activity of Delta3 nucleic acids, proteins, and modulators thereof may be desirable and may be accomplished by, for example the use of Delta3 agonists or mimetics or by gene replacement therapy, as described herein.

[0819] Yet other Delta3 therapeutics comprise of a first peptide comprising a Delta3 peptide capable of binding to a receptor, e.g., a Notch receptor, and a second peptide which is cytotoxic. Such therapeutics can be used to specifically target and lyse cells expressing or over-expressing a receptor for Delta3. For example, a fusion protein containing a Delta3 peptide fused to a cytotoxic peptide can be used to eliminate or reduce a tumor over-expressing Notch, e.g., colon and cervix neoplastic tumors. Alternatively, cells expressing or over-expressing Delta3 can be targeted for lysis, by, for example, targeting to the cell an antibody binding specifically to a Delta3 protein linked to a cytotoxic peptide.

[0820] Based at least in part on the similarity of protein structure, it is likely that Delta3 nucleic acids, proteins, and modulators thereof can also be used to treat diseases or conditions caused by or contributed by an aberrant activity of a Delta family gene product, e.g., an aberrant Delta1 or Delta2 activity or diseases or disorders which are associated with one or more specific Delta alleles, e.g., Delta1 or Delta2 alleles. Such diseases or conditions could include neurological diseases and cancer. Similarly, Delta therapeutics, e.g., Delta1 or Delta2 therapeutics, could be used to prevent or treat diseases or disorders caused by or contributed to by an aberrant Delta3 activity, or diseases or disorders which are associated with a specific Delta3 allele. Delta therapeutics can be prepared using, e.g., the nucleotide and protein sequence information disclosed in the PCT Patent Publication WO 97/01571 and tested using the assays described herein for testing Delta3 therapeutics.

[0821] Compounds identified as increasing or decreasing Delta3 gene expression or protein activity can be administered to a subject at therapeutically effective dose to treat or ameliorate cardiovascular disease. A therapeutically effective dose refers to that amount of the compound sufficient to result in amelioration of symptoms associated with the particular disease.

### Pharmaceutical Compositions

[0822] The Delta3, FTHMA-070, Tango85, Tango77, SPOIL, NEOKINE, Tango129 or A259 nucleic acid molecules, Delta3, FTHMA-070, Tango85, Tango77, SPOIL, NEOKINE, Tango129 or A259 proteins, and anti-Delta3, FTHMA-070, Tango85, Tango77, SPOIL, NEOKINE, Tango129 or A259 antibodies (also referred to herein as “active compounds”) of the invention can be incorporated into pharmaceutical compositions suitable for administration. Such compositions typically comprise the nucleic acid molecule, protein, or antibody and a pharmaceutically acceptable carrier. As used herein the language “pharmaceutically acceptable carrier” is intended to include any and all solvents, dispersion media, coatings, antibacterial and antifungal agents, isotonic and absorption delaying agents, and the like, compatible with pharmaceutical administration. The use of such media and agents for pharmaceutically active substances is well known in the art. Except insofar as any conventional media or agent is incompatible with the active compound, use thereof in the compositions is contemplated. Supplementary active compounds can also be incorporated into the compositions.

[0823] The invention includes methods for preparing pharmaceutical compositions for modulating the expression or activity of a polypeptide or nucleic acid of the invention. Such methods comprise formulating a pharmaceutically acceptable carrier with an agent which modulates expression or activity of a polypeptide or nucleic acid of the invention. Such compositions can further include additional active agents. Thus, the invention further includes methods for preparing a pharmaceutical composition by formulating a pharmaceutically acceptable carrier with an agent which modulates expression or activity of a polypeptide or nucleic acid of the invention and one or more additional active compounds.

[0824] A pharmaceutical composition of the invention is formulated to be compatible with its intended route of administration. Examples of routes of administration include parenteral, e.g., intravenous, intradermal, subcutaneous, oral (e.g., inhalation), transdermal (topical), transmucosal, intramuscular and rectal administration. Solutions or suspensions used for parenteral, intradermal, or subcutaneous application can include the following components: a sterile diluent such as water for injection, saline solution, fixed oils, polyethylene glycols, glycerine, propylene glycol or other synthetic solvents; antibacterial agents such as benzyl alcohol or methyl parabens; antioxidants such as ascorbic acid or sodium bisulfite; chelating agents such as ethylenediaminetetraacetic acid; buffers such as acetates, citrates or phosphates and agents for the adjustment of tonicity such as sodium chloride or dextrose. pH can be adjusted with acids or bases, such as hydrochloric acid or sodium hydroxide. The parenteral preparation can be enclosed in ampoules, disposable syringes or multiple dose vials made of glass or plastic.

[0825] Pharmaceutical compositions suitable for injectable use include sterile aqueous solutions (where water soluble) or dispersions and sterile powders for the extemporaneous preparation of sterile injectable solutions or dispersions. For intravenous administration, suitable carriers include physiological saline, bacteriostatic water, Cremophor EL (BASF; Parsippany, N.J.) or phosphate buffered saline (PBS). In all'cases, the composition must be sterile and should be fluid to the extent that easy syringability exists. It must be stable under the conditions of manufacture and storage and must be preserved against the contaminating action of microorganisms such as bacteria and fungi. The carrier can be a solvent or dispersion medium containing, for example, water, ethanol, polyol (for example, glycerol, propylene glycol, and liquid polyetheylene glycol, and the like), and suitable mixtures thereof. The proper fluidity can be maintained, for example, by the use of a coating such as lecithin, by the maintenance of the required particle size in the case of dispersion and by the use of surfactants. Prevention of the action of microorganisms can be achieved by various antibacterial and antifungal agents, for example, parabens, chlorobutanol, phenol, ascorbic acid, thimerosal, and the like. In many cases, it will be preferable to include isotonic agents, for example, sugars, polyalcohols such as mannitol, sorbitol, sodium chloride in the composition. Prolonged absorption of the injectable compositions can be brought about by including in the composition an agent which delays absorption, for example, aluminum monostearate and gelatin.

[0826] Sterile injectable solutions can be prepared by incorporating the active compound (e.g., a Delta3, FTHMA-070, Tango85, Tango77, SPOIL, NEOKINE, Tango129 or A259 protein or anti-Delta3, FTHMA-070, Tango85, Tango77, SPOIL, NEOKINE, Tango129 or A259 antibody) in the required amount in an appropriate solvent with one or a combination of ingredients enumerated above, as required, followed by filtered sterilization. Generally, dispersions are prepared by incorporating the active compound into a sterile vehicle which contains a basic dispersion medium and the required other ingredients from those enumerated above. In the case of sterile powders for the preparation of sterile injectable solutions, the preferred methods of preparation are vacuum drying and freeze-drying which yields a powder of the active ingredient plus any additional desired ingredient from a previously sterile-filtered solution thereof.

[0827] Oral compositions generally include an inert diluent or an edible carrier. They can be enclosed in gelatin capsules or compressed into tablets. For the purpose of oral therapeutic administration, the active compound can be incorporated with excipients and used in the form of tablets, troches, or capsules. Oral compositions can also be prepared using a fluid carrier for use as a mouthwash, wherein the compound in the fluid carrier is applied orally and swished and expectorated or swallowed.

[0828] Pharmaceutically compatible binding agents, and/or adjuvant materials can be included as part of the composition. The tablets, pills, capsules, troches and the like can contain any of the following ingredients, or compounds of a similar nature: a binder such as microcrystalline cellulose, gum tragacanth or gelatin; an excipient such as starch or lactose, a disintegrating agent such as alginic acid, Primogel, or corn starch; a lubricant such as magnesium stearate or Sterotes; a glidant such as colloidal silicon dioxide; a sweetening agent such as sucrose or saccharin; or a flavoring agent such as peppermint, methyl salicylate, or orange flavoring.

[0829] For administration by inhalation, the compounds are delivered in the form of an aerosol spray from a pressurized container or dispenser which contains a suitable propellant, e.g., a gas such as carbon dioxide, or a nebulizer.

[0830] Systemic administration can also be by transmucosal or transdermal means. For transmucosal or transdermal administration, penetrants appropriate to the barrier to be permeated are used in the formulation. Such penetrants are generally known in the art, and include, for example, for transmucosal administration, detergents, bile salts, and fusidic acid derivatives. Transmucosal administration can be accomplished through the use of nasal sprays or suppositories. For transdermal administration, the active compounds are formulated into ointments, salves, gels, or creams as generally known in the art.

[0831] The compounds can also be prepared in the form of suppositories (e.g., with conventional suppository bases such as cocoa butter and other glycerides) or retention enemas for rectal delivery.

[0832] In one embodiment, the active compounds are prepared with carriers that will protect the compound against rapid elimination from the body, such as a controlled release formulation, including implants and microencapsulated delivery systems. Biodegradable, biocompatible polymers can be used, such as ethylene vinyl acetate, polyanhydrides, polyglycolic acid, collagen, polyorthoesters, and polylactic acid. Methods for preparation of such formulations will be apparent to those skilled in the art. The materials can also be obtained commercially from Alza Corporation and Nova Pharmaceuticals, Inc. Liposomal suspensions (including liposomes targeted to infected cells with monoclonal antibodies to viral antigens) can also be used as pharmaceutically acceptable carriers. These can be prepared according to methods known to those skilled in the art, for example, as described in U.S. Pat. No. 4,522,811.

[0833] It is especially advantageous to formulate oral or parenteral compositions in dosage unit form for ease of administration and uniformity of dosage. Dosage unit form as used herein refers to physically discrete units suited as unitary dosages for the subject to be treated; each unit containing a predetermined quantity of active compound calculated to produce the desired therapeutic effect in association with the required pharmaceutical carrier. The specification for the dosage unit forms of the invention are dictated by and directly dependent on the unique characteristics of the active compound and the particular therapeutic effect to be achieved, and the limitations inherent in the art of compounding such an active compound for the treatment of individuals.

[0834] For antibodies, the preferred dosage is 0.1 mg/kg to 100 mg/kg of body weight (generally 10 mg/kg to 20 mg/kg). If the antibody is to act in the brain, a dosage of 50 mg/kg to 100 mg/kg is usually appropriate. Generally, partially human antibodies and fully human antibodies have a longer half-life within the human body than other antibodies. Accordingly, lower dosages and less frequent administration is often possible. Modifications such as lipidation can be used to stabilize antibodies and to enhance uptake and tissue penetration (e.g., into the brain). A method for lipidation of antibodies is described by Cruikshank et al. ((1997) J. Acquired Immune Deficiency Syndromes and Human Retrovirology 14:193).

[0835] As defined herein, a therapeutically effective amount of protein or polypeptide (i.e., an effective dosage) ranges from about 0.001 to 30 mg/kg body weight, preferably about 0.01 to 25 mg/kg body weight, more preferably about 0.1 to 20 mg/kg body weight, and even more preferably about 1 to 10 mg/kg, 2 to 9 mg/kg, 3 to 8 mg/kg, 4 to 7 mg/kg, or 5 to 6 mg/kg body weight.

[0836] With regard to antibodies which are to act in the brain, a dosage of 50 mg/kg to 100 mg/kg is typically appropriate. Generally, partially human antibodies and fully human antibodies have a longer half-life within the human body than other antibodies. Accordingly, lower dosages and less frequent administration is often possible. Modifications such as lipidation can be used to stabilize antibodies and to enhance uptake and tissue penetration (e.g., into the brain). A method for lipidation of antibodies is described by Cruikshank et al. ((1997) J. Acquired Immune Deficiency Syndromes and Human Retrovirology 14:193).

[0837] Toxicity and therapeutic efficacy of such compounds can be determined by standard pharmaceutical procedures in cell cultures or experimental animals, e.g., for determining the LD50 (the dose lethal to 50% of the population) and the ED50 (the dose therapeutically effective in 50% of the population). The dose ratio between toxic and therapeutic effects is the therapeutic index and it can be expressed as the ratio LD50/ED50. Compounds which exhibit large therapeutic indices are preferred. While compounds that exhibit toxic side effects may be used, care should be taken to design a delivery system that targets such compounds to the site of affected tissue in order to minimize potential damage to uninfected cells and, thereby, reduce side effects.

[0838] The data obtained from the cell culture assays and animal studies can be used in formulating a range of dosage for use in humans. The dosage of such compounds lies preferably within a range of circulating concentrations that include the ED50 with little or no toxicity. The dosage may vary within this range depending upon the dosage form employed and the route of administration utilized. For any compound used in the method of the invention, the therapeutically effective dose can be estimated initially from cell culture assays. A dose may be formulated in animal models to achieve a circulating plasma concentration range that includes the IC50 (i.e., the concentration of the test compound which achieves a half-maximal inhibition of symptoms) as determined in cell culture. Such information can be used to more accurately determine useful doses humans. Levels in plasma may be measured, for example, by high performance liquid chromatography.

[0839] The skilled artisan will appreciate that certain factors may influence the dosage required to effectively treat a subject, including but not limited to the severity of the disease or disorder, previous treatments, the general health and/or age of the subject, and other diseases present. Moreover, treatment of a subject with a therapeutically effective amount of a protein, polypeptide, or antibody can include a single treatment or, preferably, can include a series of treatments. In one embodiment, a subject is treated with a protein, or polypeptide in the range of between about 0.1 to 20 mg/kg body weight, one time per week for between about 1 to 10 weeks, preferably between about 2 to 8 weeks, more preferably between about 3 to 8 weeks, and even more preferably for about 4, 5, or 6 weeks. It will also be appreciated that the effective dosage of antibody, protein, or polypeptide used for treatment may increase or decrease over the course of a particular treatment. Changes in dosage may result and become apparent from the results of diagnostic assays as described herein.

[0840] The nucleic acid molecules of the invention can be inserted into vectors and used as gene therapy vectors. Gene therapy vectors can be delivered to a subject by, for example, intravenous injection, local administration (U.S. Pat. No. 5,328,470) or by stereotactic injection (see, e.g., Chen et al. (1994) Proc. Natl. Acad. Sci. USA 91:3054-3057). The pharmaceutical preparation of the gene therapy vector can include the gene therapy vector in an acceptable diluent, or can comprise a slow release matrix in which the gene delivery vehicle is imbedded. Alternatively, where the complete gene delivery vector can be produced intact from recombinant cells, e.g. retroviral vectors, the pharmaceutical preparation can include one or more cells which produce the gene delivery system.

[0841] The pharmaceutical compositions can be included in a container, pack, or dispenser together with instructions for administration.

[0842] In clinical settings, the gene delivery systems for the therapeutic Delta3 gene can be introduced into a patient by any of a number of methods, each of which is familiar in the art. For instance, a pharmaceutical preparation of the gene delivery system can be introduced systemically, e.g., by intravenous injection, and specific transduction of the protein in the target cells occurs predominantly from specificity of transfection provided by the gene delivery vehicle, cell-type or tissue-type expression due to the transcriptional regulatory sequences controlling expression of the receptor gene, or a combination thereof. In other embodiments, initial delivery of the recombinant gene is more limited with introduction into the animal being quite localized. For example, the gene delivery vehicle can be introduced by catheter (see U.S. Pat. No. 5,328,470) or by stereotactic injection (e.g., Chen et al. (1994) Proc. Natl. Aacd. Sci. USA 91: 3054-3057). A Delta3 gene, such as any one of the sequences represented in the group consisting of SEQ ID NOs: 1, 3, 24, 26, 27, 29, 31, 33, 35, 37, 39, 41, 43 or 45, or a sequence homologous thereto can be delivered in a gene therapy construct by electroporation using techniques described, for example, by Dev et al. ((1994) Cancer Treat. Rev. 20:105-115).

[0843] The pharmaceutical preparation of the gene therapy construct can consist essentially of the gene delivery system in an acceptable diluent, or can comprise a slow release matrix in which the gene delivery vehicle is imbedded. Alternatively, where the complete gene delivery system can be produced intact from recombinant cells, e.g., retroviral vectors, the pharmaceutical preparation can comprise one or more cells which produce the gene delivery system.

[0844] The compositions may, if desired, be presented in a pack or dispenser device which may contain one or more unit dosage forms containing the active ingredient. The pack may for example comprise metal or plastic foil, such as a blister pack. The pack or dispenser device may be accompanied by instructions for administration.

### Uses and Methods of the Invention

[0845] The nucleic acid molecules, proteins, protein homologues, and antibodies described herein can be used in one or more of the following methods: a) screening assays; b) detection assays (e.g., chromosomal mapping, tissue typing, forensic biology), c) predictive medicine (e.g., diagnostic assays, prognostic assays, monitoring clinical trials, and pharmacogenomics); and d) methods of treatment (e.g., therapeutic and prophylactic). The isolated nucleic acid molecules of the invention can be used to express FTHMA-070, Tango85, Tango77 or A259 protein (e.g., via a recombinant expression vector in a host cell in gene therapy applications), to detect FTHMA-070, Tango85, Tango77 or A259 mRNA (e.g., in a biological sample) or a genetic lesion in a FTHMA-070, Tango85, Tango77 or A259 gene, and to modulate FTHMA-070, Tango85, Tango77 or A259 activity. In addition, the FTHMA-070, Tango85, Tango77 or A259 proteins can be used to screen drugs or compounds which modulate the FTHMA-070, Tango85, Tango77 or A259 activity or expression as well as to treat disorders characterized by insufficient or excessive production of FTHMA-070, Tango85, Tango77 or A259 protein or production of FTHMA-070, Tango85, Tango77 or A259 protein forms which have decreased or aberrant activity compared to FTHMA-070, Tango85, Tango77 or A259 wild type protein. In addition, the anti-FTHMA-070, Tango85, Tango77 or A259 antibodies of the invention can be used to detect and isolate FTHMA-070, Tango85, Tango77 or A259 proteins and modulate FTHMA-070, Tango85, Tango77 or A259 activity.

[0846] The nucleic acid molecules, proteins, protein homologues, and antibodies described herein can be used in one or more of the following methods: a) screening assays; b) detection assays (e.g., chromosomal mapping, tissue typing, forensic biology), c) predictive medicine (e.g., diagnostic assays, prognostic assays, monitoring clinical trials); and d) methods of treatment (e.g., therapeutic and prophylactic methods as well as such methods in the context of pharmacogenomics). As described herein, a SPOIL protein of the invention has one or more of the following activities: (i) interaction of a SPOIL protein in the extracellular milieu with a protein molecule on the surface of the same cell which secreted the SPOIL protein molecule (e.g., a SPOIL receptor or IL-1 receptor); (ii) interaction of a SPOIL protein in the extracellular milieu with a protein molecule on the surface of a different cell from that which secreted the SPOIL protein molecule (e.g., a SPOIL receptor or IL-1 receptor); (iii) complex formation between a SPOIL protein and a cell-surface receptor; (iv) interaction of a SPOIL protein with a target molecule in the extracellular milieu, and (v) interaction of the SPOIL protein with a target molecule in the cytoplasm of a cell, and can thus be used in, for example (1) regulating a signal transduction pathway (e.g., an IL-1-dependent or SPOIL-dependent pathway; (2) modulating cytokine production and/or secretion; (3) modulating lymphokine production and/or secretion; (4) modulating production of adhesion molecules; (5) modulation of nuclear transcription factors; (6) modulating secretion of IL-1; (7) competing with IL-1 to bind an IL-1 receptor; (8) modulating a proinflammatory cytokine; (9) modulating cell proliferation, development or differentiation (e.g., IL-1-stimulated or SPOIL stimulated); (10) modulating bone metabolism (e.g., bone formation and reabsorption); and (11) mediating cellular “acute phase” response. The isolated nucleic acid molecules of the invention can be used, for example, to express SPOIL protein (e.g., via a recombinant expression vector in a host cell in gene therapy applications), to detect SPOIL mRNA (e.g., in a biological sample) or a genetic alteration in an SPOIL gene, and to modulate IL-1 activity, as described further below. In addition, the SPOIL proteins can be screened which modulate the SPOIL activity as well as to treat disorders characterized by insufficient or excessive production of IL-1 which have decreased or aberrant activity compared to normal IL-1 expression (e.g., inflammatory diseases, e.g., rheumatoid arthritis, sepsis, stroke or diabetes, or stimulated differentiative or developmental disorders such as bone metabolism disorders, e.g., osteoporosis, Paget's disease of bone, hypercalcemia of malignancy or osteolytic metastases, or diseases that involve the bowel and are characterized by the production of inflammation and/or ulceration in the small or large bowel including, e.g., inflammatory bowl disease (IBD), Crohn's disease, irritable bowel syndrome (IBS) and ulcerative colitis. Soluble forms of the SPOIL protein can be used to bind IL-1 receptors and influence bioavailability of such a receptors cognate ligand. In addition, the anti-SPOIL antibodies of the invention can be used to detect and isolate SPOIL proteins.

[0847] The nucleic acid molecules, proteins, protein homologues, and antibodies described herein can be used in one or more of the following methods: a) screening assays; b) predictive medicine (e.g., diagnostic assays, prognostic assays, monitoring clinical trials, and pharmacogenetics); and c) methods of treatment (e.g., therapeutic and prophylactic). As described herein, a NEOKINE protein of the invention has one or more of the following activities: (i) interaction of a NEOKINE protein with a membrane-bound NEOKINE receptor; (ii) interaction of a NEOKINE protein with a membrane-bound chemokine receptor; (iii) indirect interaction of a NEOKINE protein with an intracellular protein via a membrane-bound NEOKINE receptor; (iv) indirect interaction of a NEOKINE protein with an intracellular protein via a membrane-bound chemokine receptor; (v) complex formation between a soluble NEOKINE protein and a NEOKINE binding partner; (vi) inhibition of the interaction of chemokines (e.g., pro-inflammatory chemokines) by binding to their cognate receptors; (vii) inhibition of the binding of HIV to HIV co-receptors; and (vii) inhibition of the binding of HIV to HIV co-receptors wherein said binding induces subsequent infection of susceptible cells and can can thus be used in, for example, (1) modulation of cellular signal transduction, either in vitro or in vivo; (2) regulation of gene transcription in a cell expressing a NEOKINE receptor or a chemokine receptor; (3) regulation of gene transcription in a cell expressing a NEOKINE receptor or a chemokine receptor, wherein said cell is involved in angiogenesis or inflammation; (4) regulation of angiogenesis; (5) regulation of angiogenesis, wherein said regulation comprises inhibition of angiogenesis; (6) regulation of angiogenesis, wherein said regulation comprises maintenance of angiostasis; (7) regulation of inflammation; and (8) regulation of inflammation, wherein said regulation comprises inhibition of chemoattraction (e.g., neutrophil chemoattraction), inhibition of inflammation, inhibition of inflammation by blocking the action of pro-inflammatory chemokines by binding to their cognate receptors, inhibition of psoriasis, suppression of immune rejection following skin graft, suppression of immune rejection following kidney transplant, inhibition of kidney inflammation in acute renal failure, inhibition of brain inflammation following stroke or ischaemia, or inhibition of brain inflammation following viral infection. The isolated nucleic acid molecules of the invention can be used, for example, to express NEOKINE protein (e.g., via a recombinant expression vector in a host cell in gene therapy applications), to detect NEOKINE mRNA (e.g., in a biological sample) or a genetic alteration in a NEOKINE gene, and to modulate NEOKINE activity, as described further below. The NEOKINE proteins can be used to treat disorders characterized by insufficient or excessive production of a non-NEOKINE chemokine or production of chemokine forms which have decreased or aberrant activity compared to wild type chemokines. In addition, the NEOKINE proteins can be used to screen drugs or compounds which modulate the NEOKINE activity as well as to treat disorders characterized by insufficient or excessive production of NEOKINE protein or production of NEOKINE protein forms which have decreased or aberrant activity compared to NEOKINE wild type protein. Moreover, the anti-NEOKINE antibodies of the invention can be used to detect and isolate NEOKINE proteins, regulate the bioavailability of NEOKINE proteins, and modulate NEOKINE activity.

[0848] The nucleic acid molecules, proteins, protein homologues, and antibodies described herein can be used in one or more of the following methods: a) screening assays; b) detection assays (e.g., chromosomal mapping, tissue typing, forensic biology), c) predictive medicine (e.g., diagnostic assays, prognostic assays, monitoring clinical trials, and pharmacogenomics); and d) methods of treatment (e.g., therapeutic and prophylactic). A T129 protein interacts with other cellular proteins and can thus be used for (i) regulation of cellular proliferation; (ii) regulation of cellular differentiation; and (iii) regulation of cell survival. The isolated nucleic acid molecules of the invention can be used to express T129 protein (e.g., via a recombinant expression vector in a host cell in gene therapy applications), to detect T129 mRNA (e.g., in a biological sample) or a genetic lesion in a T129 gene, and to modulate T129 activity. In addition, the T129 proteins can be used to screen drugs or compounds which modulate the T129 activity or expression as well as to treat disorders characterized by insufficient or excessive production of T129 protein or production of T129 protein forms which have decreased or aberrant activity compared to T129 wild type protein. In addition, the anti-T129 antibodies of the invention can be used to detect and isolate T129 proteins and modulate T129 activity.

[0849] This invention further pertains to novel agents identified by the above-described screening assays and uses thereof for treatments as described herein.

### FTHMA-070. T85, T129 or A259 Screening Assays

[0850] The invention provides a method (also referred to herein as a “screening assay”) for identifying modulators, i.e., candidate or test compounds or agents (e.g., peptides, peptidomimetics, small molecules or other drugs) which bind to FTHMA-070, T85, T129 or A259 proteins or have a stimulatory or inhibitory effect on, for example, FTHMA-070, T85, T129 or A259 expression or FTHMA-070, T85, T129 or A259 activity.

[0851] In one embodiment, the invention provides assays for screening candidate or test compounds which bind to or modulate the activity of the membrane-bound form of a FTHMA-070, T85, T129 or A259 protein or polypeptide or biologically active portion thereof. The test compounds of the present invention can be obtained using any of the numerous approaches in combinatorial library methods known in the art, including: biological libraries; spatially addressable parallel solid phase or solution phase libraries; synthetic library methods requiring deconvolution; the ‘one-bead one-compound’ library method; and synthetic library methods using affinity chromatography selection. The biological library approach is limited to peptide libraries, while the other four approaches are applicable to peptide, non-peptide oligomer or small molecule libraries of compounds (Lam, (1997) Anticancer Drug Des. 12:145).

[0852] Examples of methods for the synthesis of molecular libraries can be found in the art, for example in: DeWitt et al. (1993) Proc. Natl. Acad. Sci. U.S.A. 90:6909; Erb et al. (1994) Proc. Natl. Acad. Sci. USA 91:11422; Zuckermann et al. (1994). J. Med. Chem. 37:2678; Cho et al. (1993) Science 261:1303; Carrell et al. (1994) Angew. Chem. Int. Ed. Engl. 33:2059; Carell et al. (1994) Angew. Chem. Int. Ed. Engl. 33:2061; and Gallop et al. (1994) J. Med. Chem. 37:1233.

[0853] Libraries of compounds may be presented in solution (e.g., Houghten (1992) Bio/Techniques 13:412-421), or on beads (Lam (1991) Nature 354:82-84), chips (Fodor (1993) Nature 364:555-556), bacteria (U.S. Pat. No. 5,223,409), spores (U.S. Pat. No. 5,571,698; 5,403,484; and 5,223,409), plasmids (Cull et al. (1992) Proc. Natl. Acad. Sci. USA 89:1865-1869) or on phage (Scott and Smith (1990) Science 249:386-390; Devlin (1990) Science 249:404-406; Cwirla et al. (1990) Proc. Natl. Acad. Sci. 87:6378-6382; and Felici (1991) J. Mol. Biol. 222:301-310).

[0854] In one embodiment, an assay is a cell-based assay in which a cell which expresses a membrane-bound form of FTHMA-070, T85, T129 or A259 protein, or a biologically active portion thereof, on the cell surface is contacted with a test compound and the ability of the test compound to bind to a FTHMA-070, T85, T129 or A259 protein determined. The cell, for example, can be a yeast cell or a cell of mammalian origin. Determining the ability of the test compound to bind to the FTHMA-070, T85, T129 or A259 protein can be accomplished, for example, by coupling the test compound with a radioisotope or enzymatic label such that binding of the test compound to the FTHMA-070, T85, T129 or A259 protein or biologically active portion thereof can be determined by detecting the labeled compound in a complex. For example, test compounds can be labeled with ¹²⁵I, ³⁵S, ¹⁴C, or ³H, either directly or indirectly, and the radioisotope detected by direct counting of radioemmission or by scintillation counting. Alternatively, test compounds can be enzymatically labeled with, for example, horseradish peroxidase, alkaline phosphatase, or luciferase, and the enzymatic label detected by determination of conversion of an appropriate substrate to product. In a preferred embodiment, the assay comprises contacting a cell which expresses a membrane-bound form of FTHMA-070, T85, T129 or A259 protein, or a biologically active portion thereof, on the cell surface with a known compound which binds FTHMA-070, T85, T129 or A259 to form an assay mixture, contacting the assay mixture with a test compound, and determining the ability of the test compound to interact with a FTHMA-070, T85, T129 or A259 protein, wherein determining the ability of the test compound to interact with a FTHMA-070, T85, T129 or A259 protein comprises determining the ability of the test compound to preferentially bind to FTHMA-070, T85, T129 or A259 or a biologically active portion thereof as compared to the known compound.

[0855] In another embodiment, an assay is a cell-based assay comprising contacting a cell expressing a membrane-bound form of FTHMA-070, T85, T129 or A259 protein, or a biologically active portion thereof, on the cell surface with a test compound and determining the ability of the test compound to modulate (e.g., stimulate or inhibit) the activity of the FTHMA-070, T85, T129 or A259 protein or biologically active portion thereof. Determining the ability of the test compound to modulate the activity of FTHMA-070, T85, T129 or A259 or a biologically active portion thereof can be accomplished, for example, by determining the ability of the FTHMA-070, T85, T129 or A259 protein to bind to or interact with a FTHMA-070, T85, T129 or A259 target molecule. As used herein, a “target molecule” is a molecule with which a FTHMA-070, T85, T129 or A259 protein binds or interacts in nature, for example, a molecule on the surface of a cell which expresses a FTHMA-070, T85, T129 or A259 protein, a molecule on the surface of a second cell, a molecule in the extracellular milieu, a molecule associated with the internal surface of a cell membrane or a cytoplasmic molecule. A FTHMA-070, T85, T129 or A259 target molecule can be a non-FTHMA-070, T85, T129 or A259 molecule or a FTHMA-070, T85, T129 or A259 protein or polypeptide of the present invention. In one embodiment, a FTHMA-070, T85, T129 or A259 target molecule is a component of a signal transduction pathway which facilitates transduction of an extracellular signal (e.g., a signal generated by binding of a compound to a membrane-bound FTHMA-070, T85, T129 or A259 molecule) through the cell membrane and into the cell. The target, for example, can be a second intercellular protein which has catalytic activity or a protein which facilitates the association of downstream signaling molecules with FTHMA-070, T85, T129 or A259.

[0856] Determining the ability of the FTHMA-070, T85, T129 or A259 polypeptide of the invention to bind to or interact with a target molecule can be accomplished by one of the methods described above for determining direct binding. As used herein, a “target molecule” is a molecule with which a selected polypeptide (e.g., a polypeptide of the invention) binds or interacts with in nature, for example, a molecule on the surface of a cell which expresses the selected protein, a molecule on the surface of a second cell, a molecule in the extracellular milieu, a molecule associated with the internal surface of a cell membrane or a cytoplasmic molecule. A target molecule can be a FTHMA-070, T85, T129 or A259 polypeptide of the invention or some other polypeptide or protein. For example, a target molecule can be a component of a signal transduction pathway which facilitates transduction of an extracellular signal (e.g., a signal generated by binding of a compound to a polypeptide of the invention) through the cell membrane and into the cell or a second intercellular protein which has catalytic activity or a protein which facilitates the association of downstream signaling molecules with a polypeptide of the invention. Determining the ability of a FTHMA-070, T85, T129 or A259 polypeptide of the invention to bind to or interact with a target molecule can be accomplished by determining the activity of the target molecule. For example, the activity of the target molecule can be determined by detecting induction of a cellular second messenger of the target (e.g., intracellular Ca²⁺, diacylglycerol, IP3, etc.), detecting catalytic/enzymatic activity of the target on an appropriate substrate, detecting the induction of a reporter gene (e.g., a regulatory element that is responsive to a polypeptide of the invention operably linked to a nucleic acid encoding a detectable marker, e.g., luciferase), or detecting a cellular response, for example, cellular differentiation, or cell proliferation.

[0857] In yet another embodiment, an assay of the present invention is a cell-free assay comprising contacting a FTHMA-070, T85, T129 or A259 protein or biologically active portion thereof with a test compound and determining the ability of the test compound to bind to the FTHMA-070, T85, T129 or A259 protein or biologically active portion thereof. Binding of the test compound to the FTHMA-070, T85, T129 or A259 protein can be determined either directly or indirectly as described above. In a preferred embodiment, the assay includes contacting the FTHMA-070, T85, T129 or A259 protein or biologically active portion thereof with a known compound which binds FTHMA-070, T85, T129 or A259 to form an assay mixture, contacting the assay mixture with a test compound, and determining the ability of the test compound to interact with a FTHMA-070, T85, T129 or A259 protein, wherein determining the ability of the test compound to interact with a FTHMA-070, T85, T129 or A259 protein comprises determining the ability of the test compound to preferentially bind to FTHMA-070, T85, T129 or A259 or biologically active portion thereof as compared to the known compound.

[0858] In another embodiment, an assay is a cell-free assay comprising contacting FTHMA-070, T85, T129 or A259 protein or biologically active portion thereof with a test compound and determining the ability of the test compound to modulate (e.g., stimulate or inhibit) the activity of the FTHMA-070, T85, T129 or A259 protein or biologically active portion thereof. Determining the ability of the test compound to modulate the activity of FTHMA-070, T85, T129 or A259 can be accomplished, for example, by determining the ability of the FTHMA-070, T85, T129 or A259 protein to bind to a FTHMA-070, T85, T129 or A259 target molecule by one of the methods described above for determining direct binding. In an alternative embodiment, determining the ability of the test compound to modulate the activity of FTHMA-070, T85, T129 or A259 can be accomplished by determining the ability of the FTHMA-070, T85, T129 or A259 protein further modulate a FTHMA-070, T85, T129 or A259 target molecule. For example, the catalytic/enzymatic activity of the target molecule on an appropriate substrate can be determined as previously described.

[0859] In yet another embodiment, the cell-free assay comprises contacting the FTHMA-070, T85, T129 or A259 protein or biologically active portion thereof with a known compound which binds FTHMA-070, T85, T129 or A259 to form an assay mixture, contacting the assay mixture with a test compound, and determining the ability of the test compound to interact with a FTHMA-070, T85, T129 or A259 protein, wherein determining the ability of the test compound to interact with a FTHMA-070, T85, T129 or A259 protein comprises determining the ability of the FTHMA-070, T85, T129 or A259 protein to preferentially bind to or modulate the activity of a FTHMA-070, T85, T129 or A259 target molecule.

[0860] In the case of cell-free assays, it may be desirable to utilize a solubilizing agent such that the membrane-bound form of FTHMA-070, T85, T129 or A259 is maintained in solution. Examples of such solubilizing agents include non-ionic detergents such as n-octylglucoside, n-dodecylglucoside, n-dodecylmaltoside, octanoyl-N-methylglucamide, decanoyl-N-methylglucamide, Triton® X-100, Triton® X-114, Thesit®, Isotridecypoly(ethylene glycol ether)n, 3-[(3-cholamidopropyl)dimethylamminio]-1-propane sulfonate (CHAPS), 3-[(3-cholamidopropyl)dimethylamminio]-2-hydroxy-1-propane sulfonate (CHAPSO), or N-dodecyl=N,N-dimethyl-3-ammonio-1-propane sulfonate.

[0861] In more than one embodiment of the above assay methods of the present invention, it may be desirable to immobilize either FTHMA-070, T85, T129 or A259 or its target molecule to facilitate separation of complexed from uncomplexed forms of one or both of the proteins, as well as to accommodate automation of the assay. Binding of a test compound to FTHMA-070, T85, T129 or A259, or interaction of FTHMA-070, T85, T129 or A259 with a target molecule in the presence and absence of a candidate compound, can be accomplished in any vessel suitable for containing the reactants. Examples of such vessels include microtitre plates, test tubes, and micro-centrifuge tubes. In one embodiment, a fusion protein can be provided which adds a domain that allows one or both of the proteins to be bound to a matrix. For example, glutathione-S-transferase/FTHMA-070, T85, T129 or A259 fusion proteins or glutathione-S-transferase/target fusion proteins can be adsorbed onto glutathione sepharose beads (Sigma Chemical; St. Louis, Mo.) or glutathione derivatized microtitre plates, which are then combined with the test compound or the test compound and either the non-adsorbed target protein or FTHMA-070, T85, T129 or A259 protein, and the mixture incubated under conditions conducive to complex formation (e.g., at physiological conditions for salt and pH). Following incubation, the beads or microtitre plate wells are washed to remove any unbound components, the matrix immobilized in the case of beads, complex determined either directly or indirectly, for example, as described above. Alternatively, the complexes can be dissociated from the matrix, and the level of FTHMA-070, T85, T129 or A259 binding or activity determined using standard techniques.

[0862] Other techniques for immobilizing proteins on matrices can also be used in the screening assays of the invention. For example, either FTHMA-070, T85, T129 or A259 or its target molecule can be immobilized utilizing conjugation of biotin and streptavidin. Biotinylated FTHMA-070, T85, T129 or A259 or target molecules can be prepared from biotin-NHS (N-hydroxy-succinimide) using techniques well known in the art (e.g., biotinylation kit, Pierce Chemicals; Rockford, Ill.), and immobilized in the wells of streptavidin-coated 96 well plates (Pierce Chemical). Alternatively, antibodies reactive with. FTHMA-070, T85, T129 or A259 or target molecules but which do not interfere with binding of the FTHMA-070, T85, T129 or A259 protein to its target molecule can be derivatized to the wells of the plate, and unbound target or FTHMA-070, T85, T129 or A259 trapped in the wells by antibody conjugation. Methods for detecting such complexes, in addition to those described above for the GST-immobilized complexes, include immunodetection of complexes using antibodies reactive with the FTHMA-070, T85, T129 or A259 or target molecule, as well as enzyme-linked assays which rely on detecting an enzymatic activity associated with the FTHMA-070, T85, T129 or A259 or target molecule.

[0863] In another embodiment, modulators of FTHMA-070, T85, T129 or A259 expression are identified in a method in which a cell is contacted with a candidate compound and the expression of FTHMA-070, T85, T129 or A259 mRNA or protein in the cell is determined. The level of expression of FTHMA-070, T85, T129 or A259 mRNA or protein in the presence of the candidate compound is compared to the level of expression of FTHMA-070, T85, T129 or A259 mRNA or protein in the absence of the candidate compound. The candidate compound can then be identified as a modulator of FTHMA-070, T85, T129 or A259 expression based on this comparison. For example, when expression of FTHMA-070, T85, T129 or A259 mRNA or protein is greater (statistically significantly greater) in the presence of the candidate compound than in its absence, the candidate compound is identified as a stimulator of FTHMA-070, T85, T129 or A259 mRNA or protein expression. Alternatively, when expression of FTHMA-070, T85, T129 or A259 mRNA or protein is less (statistically significantly less) in the presence of the candidate compound than in its absence, the candidate compound is identified as an inhibitor of FTHMA-070, T85, T129 or A259 mRNA or protein expression. The level of FTHMA-070, T85, T129 or A259 mRNA or protein expression in the cells can be determined by methods described herein for detecting FTHMA-070, T85, T129 or A259 mRNA or protein.

[0864] In yet another aspect of the invention, the FTHMA-070, T85, T129 or A259 proteins can be used as “bait proteins” in a two-hybrid assay or three hybrid assay (see, e.g., U.S. Pat. No. 5,283,317; Zervos et al. (1993) Cell 72:223-232; Madura et al. (1993) J. Biol. Chem. 268:12046-12054; Bartel et al. (1993) Bio/Techniques 14:920-924; Iwabuchi et al. (1993) Oncogene 8:1693-1696; and WO94/10300), to identify other proteins, which bind to or interact with FTHMA-070, T85, T129 or A259 and modulate FTHMA-070, T85, T129 or A259 activity. Such FTHMA-070, T85, T129 or A259-binding proteins are also likely to be involved in the propagation of signals by the FTHMA-070, T85, T129 or A259 proteins as, for example, upstream or downstream elements of the FTHMA-070, T85, T129 or A259 pathway.

[0865] The two-hybrid system is based on the modular nature of most transcription factors, which consist of separable DNA-binding and activation domains. Briefly, the assay utilizes two different DNA constructs. In one construct, the gene that codes for FTHMA-070, T85, T129 or A259 is fused to a gene encoding the DNA binding domain of a known transcription factor (e.g., GAL-4). In the other construct, a DNA sequence, from a library of DNA sequences, that encodes an unidentified protein (“prey” or “sample”) is fused to a gene that codes for the activation domain of the known transcription factor. If the “bait” and the “prey” proteins are able to interact, in vivo, forming an FTHMA-070, T85, T129 or A259-dependent complex, the DNA-binding and activation domains of the transcription factor are brought into close proximity. This proximity allows transcription of a reporter gene (e.g., LacZ) which is operably linked to a transcriptional regulatory site responsive to the transcription factor. Expression of the reporter gene can be detected and cell colonies containing the functional transcription factor can be isolated and used to obtain the cloned gene which encodes the protein which interacts with FTHMA-070, T85, T129 or A259.

[0866] This invention further pertains to novel agents identified by the above-described screening assays and uses thereof for treatments as described herein.

### Tango-77 Screening Assays

[0867] The invention provides a method (also referred to herein as a “screening assay”) for identifying modulators, i.e., candidate or test compounds or agents (e.g., peptides, peptidomimetics, small molecules or other drugs) which bind to Tango-77 proteins or have a stimulatory or inhibitory effect on, for example, Tango-77 expression or Tango-77 activity.

[0868] Examples of methods for the synthesis of molecular libraries can be found in the art, for example in: DeWitt et al. (1993) Proc. Natl. Acad. Sci. USA 90:6909; Erb et al. (1994) Proc. Natl. Acad. Sci. USA 91:11422; Zuckermann et al. (1994). J. Med. Chem. 37:2678; Cho et al. (1993) Science 261:1303; Carrell et al. (1994) Angew. Chem. Int. Ed. Engl. 33:2059; Carell et al. (1994) Angew. Chem. Int. Ed. Engl. 33:2061; and Gallop et al. (1994) J. Med. Chem. 37:1233.

[0869] Libraries of compounds may be presented in solution (e.g., Houghten (1992) Bio/Techniques 13:412-421), or on beads (Lam (1991) Nature 354:82-84), chips (Fodor (1993) Nature 364:555-556), bacteria (U.S. Pat. No. 5,223,409), spores (U.S. Pat. No. 5,571,698; 5,403,484; and 5,223,409), plasmids (Cull et al. (1992) Proc. Natl. Acad. Sci. USA 89:1865-1869) or phage (Scott and Smith (1990) Science 249:386-390; Devlin (1990) Science 249:404-406; Cwirla et al. (1990) Proc. Natl. Acad. Sci. USA 87:6378-6382; and Felici (1991) J. Mol. Biol. 222:301-310).

[0870] In another embodiment, an assay is used to determine the ability of the test compound to modulate the activity of Tango-77 or a biologically active portion thereof, for example, by determining the ability of the Tango-77 protein to bind to or interact with a Tango-77 target molecule. As used herein, a “target molecule” is a molecule with which a Tango-77 protein binds or interacts in nature, for example, a molecule on the surface of a cell. A Tango-77 target molecule can be a non-Tango-77 molecule or a Tango-77 protein or polypeptide of the present invention. In one embodiment, a Tango-77 target molecule is a component of a signal transduction pathway, for example, Tango-77 may bind to a IL-1 receptor or another receptor thereby blocking the receptor and inhibiting future signal transduction. Determining the ability of the Tango-77 protein to bind to or interact with a Tango-77 target molecule can be accomplished by one of the methods described above. In a preferred embodiment, determining the ability of the Tango-77 protein to bind to or interact with a Tango-77 target molecule can be accomplished by determining the activity of the target molecule. For example, the activity of the target molecule can be determined by detecting induction of a cellular second messenger of the target (e.g., intracellular Ca²⁺, diacylglycerol, IP3, etc.), detecting catalytic/enzymatic activity of the target on an appropriate substrate, detecting the induction of a reporter gene (e.g., a Tango-77-responsive regulatory element operably linked to a nucleic acid encoding a detectable marker, e.g. luciferase), or detecting a cellular response, for example, inflammation.

[0871] In yet another embodiment, an assay of the present invention is a cell-free assay comprising contacting a Tango-77 protein or biologically active portion thereof with a test compound and determining the ability of the test compound to bind to the Tango-77 protein or biologically active portion thereof. Binding of the test compound to the Tango-77 protein can be determined either directly or indirectly as described above. In a preferred embodiment, the assay includes contacting the Tango-77 protein or biologically active portion thereof with a known compound which binds Tango-77 to form an assay mixture, contacting the assay mixture with a test compound, and determining the ability of the test compound to interact with a Tango-77 protein, wherein determining the ability of the test compound to interact with a Tango-77 protein comprises determining the ability of the test compound to preferentially bind to Tango-77 or biologically active portion thereof as compared to the known compound.

[0872] In another embodiment, an assay is a cell-free assay comprising contacting Tango-77 protein or biologically active portion thereof with a test compound and determining the ability of the test compound to modulate (e.g., stimulate or inhibit) the activity of the Tango-77 protein or biologically active portion thereof. Determining the ability of the test compound to modulate the activity of Tango-77 can be accomplished, for example, by determining the ability of the Tango-77 protein to bind to a Tango-77 target molecule by one of the methods described above for determining direct binding. In an alternative embodiment, determining the ability of the test compound to modulate the activity of Tango-77 can be accomplished by determining the ability of the Tango-77 protein to further modulate a Tango-77 target molecule. For example, the catalytic/enzymatic activity of the target molecule on an appropriate substrate can be determined as previously described.

[0873] In yet another embodiment, the cell-free assay comprises contacting the Tango-77 protein or biologically active portion thereof with a known compound which binds Tango-77 to form an assay mixture, contacting the assay mixture with a test compound, and determining the ability of the test compound to interact with a Tango-77 protein, wherein determining the ability of the test compound to interact with a Tango-77 protein comprises determining the ability of the Tango-77 protein to preferentially bind to or modulate the activity of a Tango-77 target molecule.

[0874] It is possible that membrane-bound forms of Tango-77 exist. The cell-free assays of the present invention are amenable to use of both the forms Tango-77. In the case of cell-free assays comprising a membrane-bound form of Tango-77, it may be desirable to utilize a solubilizing agent such that the membrane-bound form of Tango-77 is maintained in solution. Examples of such solubilizing agents include non-ionic detergents such as n-octylglucoside, n-dodecylglucoside, n-dodecylmaltoside, octanoyl-N-methylglucamide, decanoyl-N-methylglucamide, Triton® X-100, Triton® X-114, Thesit®, Isotridecypoly(ethylene glycol ether)n, 3-[(3-cholamidopropyl)dimethylamminio]-1-propane sulfonate (CHAPS), 3-[(3-cholamidopropyedimethylamminio]-2-hydroxy-1-propane sulfonate (CHAPSO), or N-dodecyl=N,N-dimethyl-3-ammonio-1-propane sulfonate.

[0875] In more than one embodiment of the above assay methods of the present invention, it may be desirable to immobilize either Tango-77 or its target molecule to facilitate separation of complexed from uncomplexed forms of one or both of the proteins, as well as to accommodate automation of the assay. Binding of a test compound to Tango-77, or interaction of Tango-77 with a target molecule in the presence and absence of a candidate compound, can be accomplished in any vessel suitable for containing the reactants. Examples of such vessels include microtitre plates, test tubes, and micro-centrifuge tubes. In one embodiment, a fusion protein can be provided which adds a domain that allows one or both of the proteins to be bound to a matrix. For example, glutathione-S-transferase/Tango-77 fusion proteins or glutathione-S-transferase/target fusion proteins can be adsorbed onto glutathione sepharose beads (Sigma Chemical Co.; St. Louis, Mo.) or glutathione derivatized microtitre plates, which are then combined with the test compound or the test compound and either the non-adsorbed target protein or Tango-77 protein, and the mixture incubated under conditions conducive to complex formation (e.g., at physiological conditions for salt and pH). Following incubation, the beads or microtitre plate wells are washed to remove any unbound components and complex formation is measured either directly or indirectly, for example, as described above. Alternatively, the complexes can be dissociated from the matrix, and the level of Tango-77 binding or activity determined using standard techniques.

[0876] Other techniques for immobilizing proteins on matrices can also be used in the screening assays of the invention. For example, either Tango-77 or its target molecule can be immobilized utilizing conjugation of biotin and streptavidin. Biotinylated Tango-77 or target molecules can be prepared from biotin-NHS(N-hydroxy-succinimide) using techniques well known in the art (e.g., biotinylation kit, Pierce Chemicals; Rockford, Ill.), and immobilized in the wells of streptavidin-coated 96 well plates (Pierce Chemical). Alternatively, antibodies reactive with Tango-77 or target molecules but which do not interfere with binding of the Tango-77 protein to its target molecule can be derivatized to the wells of the plate, and unbound target or Tango-77 trapped in the wells by antibody conjugation. Methods for detecting such complexes, in addition to those described above for the GST-immobilized complexes, include immunodetection of complexes using antibodies reactive with the Tango-77 or target molecule, as well as enzyme-linked assays which rely on detecting an enzymatic activity associated with the Tango-77 or target molecule.

[0877] In another embodiment, modulators of Tango-77 expression are identified in a method in which a cell is contacted with a candidate compound and the expression of Tango-77 mRNA or protein in the cell is determined. The level of expression of Tango-77 mRNA or protein in the presence of the candidate compound is compared to the level of expression of Tango-77 mRNA or protein in the absence of the candidate compound. The candidate compound can then be identified as a modulator of Tango-77 expression based on this comparison. For example, when expression of Tango-77 mRNA or protein is greater (statistically significantly greater) in the presence of the candidate compound than in its absence, the candidate compound is identified as a stimulator of Tango-77 mRNA or protein expression. Alternatively, when expression of Tango-77 mRNA or protein is less (statistically significantly less) in the presence of the candidate compound than in its absence, the candidate compound is identified as an inhibitor of Tango-77 mRNA or protein expression. The level of Tango-77 mRNA or protein expression in the cells can be determined by methods described herein for detecting Tango-77 mRNA or protein.

[0878] In yet another aspect of the invention, the Tango-77 proteins can be used as “bait proteins” in a two-hybrid assay or three hybrid assay (see, e.g., U.S. Pat. No. 5,283,317; Zervos et al. (1993) Cell 72:223-232; Madura et al. (1993) J. Biol. Chem. 268:12046-12054; Bartel et al. (1993) Bio/Techniques 14:920-924; Iwabuchi et al. (1993) Oncogene 8:1693-1696; and PCT Publication No. WO 94/10300), to identify other proteins, which bind to or interact with Tango-77 (“Tango-77-binding proteins” or “Tango-77-bp”) and modulate Tango-77 activity. Such Tango-77-binding proteins are also likely to be involved in the propagation of signals by the Tango-77 proteins as, for example, upstream or downstream elements of the Tango-77 pathway.

[0879] The two-hybrid system is based on the modular nature of most transcription factors, which consist of separable DNA-binding and activation domains. Briefly, the assay utilizes two different DNA constructs. In one construct, the gene that codes for Tango-77 is fused to a gene encoding the DNA binding domain of a known transcription factor (e.g., GAL-4). In the other construct, a DNA sequence, from a library of DNA sequences, that encodes an unidentified protein (“prey” or “sample”) is fused to a gene that codes for the activation domain of the known transcription factor. If the “bait” and the “prey” proteins are able to interact, in vivo, forming an Tango-77-dependent complex, the DNA-binding and activation domains of the transcription factor are brought into close proximity. This proximity allows transcription of a reporter gene (e.g., LacZ) which is operably linked to a transcriptional regulatory site responsive to the transcription factor. Expression of the reporter gene can be detected and cell colonies containing the functional transcription factor can be isolated and used to obtain the cloned gene which encodes the protein which interacts with Tango-77.

[0880] This invention further pertains to novel agents identified by the above-described screening assays and uses thereof for treatments as described herein.

### SPOIL Screening Assays:

[0881] The invention provides a method (also referred to herein as a “screening assay”) for identifying modulators, i.e., candidate or test compounds or agents (e.g., peptides, peptidomimetics, small molecules or other drugs) which bind to SPOIL proteins or have a stimulatory or inhibitory effect on, for example, SPOIL expression or SPOIL activity and/or have a stimulatory or inhibitory effect on IL-1 stimulated activities.

[0882] In one embodiment, the invention provides assays for screening candidate or test compounds which bind to or modulate the activity of a SPOIL target molecule. The test compounds of the present invention can be obtained using any of the numerous approaches in combinatorial library methods known in the art, including: biological libraries; spatially addressable parallel solid phase or solution phase libraries; synthetic library methods requiring deconvolution; the ‘one-bead one-compound’ library method; and synthetic library methods using affinity chromatography selection. The biological library approach is limited to peptide libraries, while the other four approaches are applicable to peptide, non-peptide oligomer or small molecule libraries of compounds (Lam (1997) Anticancer Drug Des. 12:145).

[0883] Examples of methods for the synthesis of molecular libraries can be found in the art, for example in: DeWitt et al. (1993) Proc. Natl. Acad. Sci. U.S.A. 90:6909; Erb et al. (1994) Proc. Natl. Acad. Sci. USA 91:11422; Zuckermann et al. (1994). J. Med. Chem. 37:2678; Cho et al. (1993) Science 261:1303; Carrell et al. (1994) Angew. Chem. Mt. Ed. Engl. 33:2059; Carell et al. (1994) Angew. Chem. Mt. Ed. Engl. 33:2061; and in Gallop et al. (1994) J. Med. Chem. 37:1233.

[0884] Libraries of compounds may be presented in solution (e.g., Houghten (1992) Biotechniques 13:412-421), or on beads (Lam (1991) Nature 354:82-84), chips (Fodor (1993) Nature 364:555-556), bacteria (Ladner U.S. Pat. No. 5,223,409), spores (Ladner USP '409), plasmids (Cull et al. (1992) Proc Natl Acad Sci USA 89:1865-1869) or on phage (Scott and Smith (1990) Science 249:386-390); (Devlin (1990) Science 249:404-406); (Cwirla et al. (1990) Proc. Natl. Acad. Sci. 87:6378-6382); (Felici (1991) J. Mol. Biol. 222:301-310); (Ladner supra.).

[0885] In one embodiment, the screening assay comprises contacting a cell which expresses a SPOIL receptor on the cell surface with a SPOIL protein or biologically-active portion thereof, to form an assay mixture, contacting the assay mixture with a test compound, and determining the ability of the test compound to interact with a SPOIL receptor, wherein determining the ability of the test compound to interact with a SPOIL receptor comprises determining the ability of the test compound to preferentially bind to the SPOIL receptor as compared to the ability of SPOIL, or a biologically active portion thereof, to bind to the receptor. In addition, the screening assay can also comprise contacting a cell which expresses a SPOIL receptor on the cell surface with a SPOIL protein or biological portion thereof, and IL-1, to form a competitive binding assay. The binding assay can then be contacted with a test compound in order to determine the ability of the test compound to preferentially bind to the receptor as compared with the SPOIL protein or biological portion thereof and/or modulate IL-1 stimulated activity by the cell.

[0886] In another embodiment, an assay is a cell-based assay comprising contacting a cell expressing a SPOIL target molecule with a test compound and determining the ability of the test compound to modulate (e.g. stimulate or inhibit) the activity of the SPOIL target molecule. Determining the ability of the test compound to modulate the activity of a SPOIL target molecule can be accomplished, for example, by determining the ability of the SPOIL protein to bind to or interact with the SPOIL target molecule in the presence of the test compound. This assay can be performed in the presence of IL-1, and the ability of the SPOIL protein to interact with the target molecule can be determined by assessing the activity of a cell that is normally stimulated by IL-1 as compared to a control assay comprising cell expressing a SPOIL target molecule, SPOIL protein and IL-1 without the test compound.

[0887] Determining the ability of the SPOIL protein to bind to or interact with a SPOIL target molecule can be accomplished by determining the activity of the target molecule. For example, the activity of the target molecule can be determined by detecting induction or lack of induction of a cellular second messenger of the target (i.e. intracellular Ca²⁺, diacylglycerol, IP₃, PGE₂, etc.), detecting catalytic/enzymatic activity of the target an appropriate substrate,detecting the induction of a reporter gene (comprising a SPOIL and/or IL-1-responsive regulatory element operatively linked to a nucleic acid encoding a detectable marker, e.g., luciferase), or detecting a cellular response or lack of a cellular response, for example, SPOIL and/or IL-1 stimulated development, differentiation or rate of proliferation.

[0888] In yet another embodiment, the assay is a cell-free assay in which a SPOIL protein or biologically active portion thereof is contacted with a test compound and the ability of the test compound to modulate (e.g., stimulate or inhibit) the activity of the SPOIL protein or biologically active portion thereof is determined. Determining the ability of the test compound to modulate the activity of a SPOIL protein can be accomplished, for example, by determining the ability of the SPOIL protein to bind to a SPOIL target molecule in the presence and/or absence of the test compound. Determining the ability of the test compound to modulate the activity of a SPOIL protein can be accomplished in the presence or absence of IL-1. Determining the ability of the SPOIL protein to bind to a SPOIL target molecule can also be accomplished using a technology such as real-time Biomolecular Interaction Analysis (BIA). Sjolander et al. (1991) Anal. Chem. 63:2338-2345 and Szabo et al. (1995) Curr. Opin. Struct. Biol. 5:699-705. As used herein, “BIA” is a technology for studying biospecific interactions in real time, without labeling any of the interactants (e.g., BIAcore™). Changes in the optical phenomenon surface plasmon resonance (SPR) can be used as an indication of real-time reactions between biological molecules.

[0889] In more than one embodiment of the above assay methods of the present invention, it may be desirable to immobilize either SPOIL or its target molecule to facilitate separation of complexed from uncomplexed forms of one or both of the proteins, as well as to accommodate automation of the assay. Binding of a test compound to a SPOIL protein, or interaction of a SPOIL protein with a target molecule in the presence and absence of a candidate compound, can be accomplished in any vessel suitable for containing the reactants. Examples of such vessels include microtitre plates, test tubes, and micro-centrifuge tubes. In one embodiment, a fusion protein can be provided which adds a domain that allows one or both of the proteins to be bound to a matrix. For example, glutathione-S-transferase/SPOIL fusion proteins or glutathione-S-transferase/target fusion proteins can be adsorbed onto glutathione sepharose beads (Sigma Chemical, St. Louis, Mo.) or glutathione derivatized microtitre plates, which are then combined with the test compound or the test compound and either the non-adsorbed target protein or SPOIL protein, and the mixture incubated under conditions conducive to complex formation (e.g., at physiological conditions for salt and pH). Following incubation, the beads or microtitre plate wells are washed to remove any unbound components, the matrix immobilized in the case of beads, complex determined either directly or indirectly, for example, as described above. Alternatively, the complexes can be dissociated from the matrix, and the level of SPOIL binding or activity determined using standard techniques.

[0890] Other techniques for immobilizing proteins on matrices can also be used in the screening assays of the invention. For example, either a SPOIL protein or a SPOIL target molecule can be immobilized utilizing conjugation of biotin and streptavidin. Biotinylated SPOIL protein or target molecules can be prepared from biotin-NHS (N-hydroxy-succinimide) using techniques well known in the art (e.g., biotinylation kit, Pierce Chemicals, Rockford, Ill.), and immobilized in the wells of streptavidin-coated 96 well plates (Pierce Chemical). Alternatively, antibodies reactive with SPOIL protein or target molecules but which do not interfere with binding of the SPOIL protein to its target molecule can be derivatized to the wells of the plate, and unbound target or SPOIL protein trapped in the wells by antibody conjugation. Methods for detecting such complexes, in addition to those described above for the GST-immobilized complexes, include immunodetection of complexes using antibodies reactive with the SPOIL protein or target molecule, as well as enzyme-linked assays which rely on detecting an enzymatic activity associated with the SPOIL protein or target molecule.

[0891] In yet another aspect of the invention, the SPOIL proteins can be used as “bait proteins” in a two-hybrid assay or three-hybrid assay (see, e.g., U.S. Pat. No. 5,283,317; Zervos et al. (1993) Cell 72:223-232; Madura et al. (1993) J. Biol. Chem. 268:12046-12054; Bartel et al. (1993) Biotechniques 14:920-924; Iwabuchi et al. (1993) Oncogene 8:1693-1696; and Brent WO94/10300), to identify other proteins, which bind to or interact with SPOIL (“SPOIL-binding proteins” or “SPOIL-bp”) and modulate SPOIL activity. Such SPOIL-binding proteins are also likely to be involved in the propagation of signals by the SPOIL proteins as, for example, downstream elements of a SPOIL-mediated signaling pathway. Alternatively, such SPOIL-binding proteins are likely to be cell-surface molecules associated with non-SPOIL expressing cells, wherein such SPOIL-binding proteins are involved in signal transduction.

[0892] The two-hybrid system is based on the modular nature of most transcription factors, which consist of separable DNA-binding and activation domains. Briefly, the assay utilizes two different DNA constructs. In one construct, the gene that codes for a SPOIL protein is fused to a gene encoding the DNA binding domain of a known transcription factor (e.g., GAL-4). In the other construct, a DNA sequence, from a library of DNA sequences, that encodes an unidentified protein (“prey” or “sample”) is fused to a gene that codes for the activation domain of the known transcription factor. If the “bait” and the “prey” proteins are able to interact, in vivo, forming a SPOIL-dependent complex, the DNA-binding and activation domains of the transcription factor are brought into close proximity. This proximity allows transcription of a reporter gene (e.g., LacZ) which is operably linked to a transcriptional regulatory site responsive to the transcription factor. Expression of the reporter gene can be detected and cell colonies containing the functional transcription factor can be isolated and used to obtain the cloned gene which encodes the protein which interacts with the SPOIL protein.

[0893] This invention further pertains to novel SPOIL agents such as SPOIL proteins or biologically active portions thereof, SPOIL variants which function as IL-1 receptor agonists and nucleic acid molecules encoding a SPOIL protein or variant, which can be screened to determine the efficacy of such agents on various SPOIL and/or IL-1 stimulated activities (e.g., stimulated immune response, proliferation, signal transduction pathway, or differentiation).

[0894] In one embodiment, determining the ability of a SPOIL agent to modulate the activity of SPOIL and/or IL-1 can be accomplished by testing the ability of the agent to interfere with the proliferation of T cells in the presence of SPOIL and/or IL-1.

[0895] It is also within the scope of this invention to further use a SPOIL agent as described herein in an appropriate animal model. For example, an agent as described herein (e.g., a modulating agent) can be used in an animal model to determine the efficacy, toxicity, or side effects of treatment with such an agent. Alternatively, a SPOIL agent identified as described herein can be used in an animal model to determine the mechanism of action of such an agent. Animal models for use in determining the efficacy or mechanism of action of a SPOIL agent of the present invention include animal models demonstrating parameters of sepsis (e.g., animals injected with E. coli to induce hypotension) and animal models for determining bone metabolism (e.g., lethally irradiated mice which have been transplanted with SPOIL infected marrow cells). Other animal models which are recognized in the art as predictive of results in humans with various IL-1 induced disorders are known in the art and described, for example, in Dinarello (1991) Blood 77(8):1627-1652. Furthermore, this invention pertains to uses of SPOIL agents and agents identified by the above-described screening assays for treatments as described herein.

### NEOKINE Screening Assays:

[0896] The invention provides a method (also referred to herein as a “screening assay”) for identifying modulators, i.e., candidate or test compounds or agents (e.g., peptides, peptidomimetics, small molecules or other drugs) which bind to NEOKINE proteins, bind to NEOKINE receptors, have a stimulatory or inhibitory effect on, for example, NEOKINE expression, NEOKINE activity, or NEOKINE receptor activity (e.g., RDC1 activity), or have a stimulatory or inhibitory effect on, for example, the expression or activity of a non-NEOKINE chemokine or non-NEOKINE chemokine receptor. It will be appreciated by one of skill in the art that modulators identified by the screening assays defined herein (e.g., modulators of NEOKINE and/or NEOKINE receptor or RDC1) can be used in the prophylactic and therapeutic treatment of diseases and disorders associated with aberrant NEOKINE and/or NEOKINE receptor activity (e.g., proliferative disorders and diseases).

[0897] In one embodiment, the invention provides assays for screening candidate or test compounds which bind to or modulate the activity of a NEOKINE protein or polypeptide or biologically active portion thereof. In another embodiment, the invention provides assays for screening candidate or test compounds which bind to or modulate the activity of a NEOKINE receptor. The test compounds of the present invention can be obtained using any of the numerous approaches in combinatorial library methods known in the art, including: biological libraries; spatially addressable parallel solid phase or solution phase libraries; synthetic library methods requiring deconvolution; the ‘one-bead one-compound’ library method; and synthetic library methods using affinity chromatography selection. The biological library approach is limited to peptide libraries, while the other four approaches are applicable to peptide, non-peptide oligomer or small molecule libraries of compounds (Lam, K. S. (1997) Anticancer Drug Des. 12:145).

[0898] Examples of methods for the synthesis of molecular libraries can be found in the art, for example in: DeWitt et al. (1993) Proc. Natl. Acad. Sci. U.S.A. 90:6909; Erb et al. (1994) Proc. Natl. Acad. Sci. USA 91:11422; Zuckermann et al. (1994). J. Med. Chem. 37:2678; Cho et al. (1993) Science 261:1303; Carrell et al. (1994) Angew. Chem. Int. Ed. Engl. 33:2059; Carell et al. (1994) Angew. Chem. Int. Ed. Engl. 33:2061; and in Gallop et al. (1994). J. Med. Chem. 37:1233.

[0899] Libraries of compounds may be presented in solution (e.g., Houghten (1992) Biotechniques 13:412-421), or on beads (Lam (1991) Nature 354:82-84), chips (Fodor (1993) Nature 364:555-556), bacteria (Ladner U.S. Pat. No. 5,223,409), spores (Ladner USP '409), plasmids (Cull et al. (1992) Proc Natl Acad Sci USA 89:1865-1869) or on phage (Scott and Smith (1990) Science 249:386-390); (Devlin (1990) Science 249:404-406); (Cwirla et al. (1990) Proc. Natl. Acad. Sci. 87:6378-6382); (Felici (1991) J. Mol. Biol. 222:301-310); (Ladner supra.).

[0900] In one embodiment, an assay is a cell-based assay in which a cell which expresses a NEOKINE receptor on the cell surface is contacted with a test compound and the ability of the test compound to bind to a NEOKINE receptor determined. The cell, for example, can be of mammalian origin or a yeast cell. The NEOKINE receptor can be heterologously expressed or over expressed in a host cell (e.g., a COS cell or fibroblastic cell, for example a HEK293 cell). Alternatively, an assay cell can be selected which endogenously expresses a NEOKINE receptor (e.g., RDC1), for example, a rat pancreatic acinar cell line, AR4-2J, a PC12 pheochromocytoma cell, a SK-N-MC neroblastoma cell, a MES-13 mesangial tumor cell, an astrocyte, or a neutrophil). (Hesen et al. (1998) Immunogenetics 47:364-370 and Law and Rosenzweig (1994) Biochem. Biophys. Res. Commun. 201:458-465). Yeast cells are also particularly amenable for use in screening assays for G-protein-coupled receptors as described, for example, in Pausch (1997) TIBTECH 15:487-494. Determining the ability of the test compound to bind to a NEOKINE receptor can be accomplished, for example, by coupling the test compound with a radioisotope or enzymatic label such that binding of the test compound to the NEOKINE receptor can be determined by detecting the labeled compound in a complex. For example, test compounds can be labeled with ¹²⁵I, ³⁵S, ¹⁴C, or ³H, either directly or indirectly, and the radioisotope detected by direct counting of radioemmission or by scintillation counting. Alternatively, test compounds can be enzymatically labeled with, for example, horseradish peroxidase, alkaline phosphatase, or luciferase, and the enzymatic label detected by determination of conversion of an appropriate substrate to product.

[0901] It is also within the scope of this invention to determine the ability of a test compound to interact with an NEOKINE receptor without the labeling of any of the interactants. For example, a microphysiometer can be used to detect the interaction of a test compound with an NEOKINE receptor without the labeling of either the test compound or the receptor. McConnell, H. M. et al. (1992) Science 257:1906-1912. As used herein, a “microphysiometer” (e.g., Cytosensor™) is an analytical instrument that measures the rate at which a cell acidifies its environment using a light-addressable potentiometric sensor (LAPS). Changes in this acidification rate can be used as an indicator of the interaction between ligand and receptor.

[0902] In a preferred embodiment, the assay comprises contacting a cell which expresses an NEOKINE receptor on the cell surface with a NEOKINE protein or biologically-active portion thereof and a test compound, and determining the ability of the test compound to modulate binding of the NEOKINE protein or biologically-active portion thereof to the NEOKINE receptor. Determining the ability of the test compound to modulate binding of the NEOKINE protein or biologically-active portion thereof to the NEOKINE receptor can comprise determining the ability of the test compound to preferentially bind to the NEOKINE receptor as compared to the ability of NEOKINE, or a biologically active portion thereof, to bind to the receptor. Alternatively, determining the ability of the test compound to modulate binding of the NEOKINE protein or biologically-active portion thereof to the NEOKINE receptor can comprise determining a change in the binding of the NEOKINE protein or biologically-active portion thereof to the NEOKINE receptor (e.g., a change in the amount of binding in the presence of the test compound as compared to the absence of the test compound).

[0903] In another preferred embodiment, the assay comprises contacting a cell which expresses a receptor specific for another chemokine on the cell surface with an NEOKINE protein or biologically-active portion thereof and a test compound, and determining the ability of the test compound to interact with the receptor, wherein determining the ability of the test compound to interact with the receptor comprises determining the ability of the test compound to preferentially bind to the receptor as compared to the ability of the NEOKINE, or a biologically active portion thereof, to bind to the receptor. Alternatively, determining the ability of the test compound to interact with the NEOKINE receptor can comprise determining a change in the binding of the NEOKINE protein or biologically-active portion thereof to the NEOKINE receptor (e.g., a change in the amount of binding).

[0904] In another embodiment, an assay is a cell-based assay comprising contacting a cell expressing a NEOKINE target molecule (e.g. a NEOKINE receptor) with a test compound and determining the ability of the test compound to modulate (e.g. stimulate or inhibit) the activity of the NEOKINE target molecule. In yet another embodiment, an assay is a cell-based assay comprising contacting a cell expressing a NEOKINE receptor with a NEOKINE protein or biologically-active portion thereof and a test compound and determining the ability of the test compound to modulate the activity of the NEOKINE target molecule.

[0905] Determining the ability of the NEOKINE protein to bind to or interact with an NEOKINE target molecule can be accomplished by one of the methods described above for determining direct binding. The activity of the target molecule can be determined by detecting induction of a cellular second messenger of the target (i.e. intracellular Ca²⁺, diacylglycerol, IP₃, etc.), detecting catalytic/enzymatic activity of the target an appropriate substrate, detecting the induction of a reporter gene (comprising an NEOKINE-responsive regulatory element operatively linked to a nucleic acid encoding a detectable marker, e.g., luciferase), or detecting a cellular response, for example, an angiogenic response or an inflammatory response.

[0906] In yet another embodiment, an assay of the present invention is a cell-free assay in which an NEOKINE protein or biologically active portion thereof is contacted with a test compound and the ability of the test compound to bind to the NEOKINE protein or biologically active portion thereof is determined. Binding of the test compound to the NEOKINE protein can be determined either directly or indirectly as described above. In a preferred embodiment, the assay includes contacting the NEOKINE protein or biologically active portion thereof with a known compound which binds NEOKINE to form an assay mixture, contacting the assay mixture with a test compound, and determining the ability of the test compound to interact with an NEOKINE protein, wherein determining the ability of the test compound to interact with an NEOKINE protein comprises determining the ability of the test compound to preferentially bind to NEOKINE or biologically active portion thereof as compared to the known compound.

[0907] In another embodiment, the assay is a cell-free assay in which an NEOKINE protein or biologically active portion thereof is contacted with a test compound and the ability of the test compound to modulate (e.g., stimulate or inhibit) the activity of the NEOKINE protein or biologically active portion thereof is determined. Determining the ability of the test compound to modulate the activity of an NEOKINE protein can be accomplished, for example, by determining the ability of the NEOKINE protein to bind to an NEOKINE target molecule by one of the methods described above for determining direct binding. Determining the ability of the NEOKINE protein to bind to an NEOKINE target molecule can also be accomplished using a technology such as real-time Biomolecular Interaction Analysis (BIA). Sjolander and Urbaniczky (1991) Anal. Chem. 63:2338-2345 and Szabo et al. (1995) Curr. Opin. Struct. Biol. 5:699-705. As used herein, “BIA” is a to technology for studying biospecific interactions in real time, without labeling any of the interactants (e.g., BIAcore™). Changes in the optical phenomenon of surface plasmon resonance (SPR) can be used as an indication of real-time reactions between biological molecules.

[0908] In an alternative embodiment, determining the ability of the test compound to modulate the activity of an NEOKINE protein can be accomplished by determining the ability of the NEOKINE protein to further modulate the activity of a downstream effector (e.g., an intracellular signaling molecule) of an NEOKINE target molecule (e.g., an NEOKINE receptor). For example, the catalytic/enzymatic activity of the effector molecule on an appropriate substrate can be determined as previously described.

[0909] In yet another embodiment, the cell-free assay involves contacting an NEOKINE protein or biologically active portion thereof with a known compound which binds the NEOKINE protein to form an assay mixture, contacting the assay mixture with a test compound, and determining the ability of the test compound to interact with the NEOKINE protein, wherein determining the ability of the test compound to interact with the NEOKINE protein comprises determining the ability of the NEOKINE protein to preferentially bind to or modulate the activity of an NEOKINE target molecule.

[0910] The assays of the present invention are based at least in part on the discovery that NEOKINE receptor is the previously identified orphan chemokine receptor, RDC1. The nucleic acid sequence of human, murine and canine RDC1 are set forth in SEQ ID NO:129, SEQ ID NO:131 and SEQ ID NO:133, respectively. The amino acid sequences of human, murine and canine RDC1 are set forth in SEQ ID NO:130, SEQ ID NO:132 or SEQ ID NO:134, respectively. Human, murine and canine RDC1 sequences can be further found at Accession Nos. U73141 & U67784, AF000236, and X14048, respectively. Accordingly, in one embodiment, the NEOKINE receptor has the amino acid set forth in any of SEQ ID NO:130, SEQ ID NO:132 or SEQ ID NO:134. In another embodiment, the NEOKINE receptor is selected encoded by a nucleic acid molecule selected from the group consisting of SEQ ID NO:129, SEQ ID NO:131 or SEQ ID NO:133. In another embodiment the NEOKINE receptor is selected from the group consisting of a receptor having an amino acid sequence which is substantially homologous to the amino acid sequence of any of SEQ ID NO:130, SEQ ID NO:132 or SEQ ID NO:134; a receptor which is encoded by an isolated nucleic acid molecule which is substantially homologous to any of SEQ ID NO:129, SEQ ID NO:131 or SEQ ID NO:133; or a receptor which is encoded by an isolated nucleic acid molecule which hybridizes under stringent conditions to a nucleic acid molecule having any of SEQ ID NO:129, SEQ ID NO:131 or SEQ ID NO:133.

[0911] The cell-free assays of the present invention are amenable to use of both soluble and/or membrane-bound forms of isolated proteins (e.g. NEOKINE proteins or biologically active portions thereof or NEOKINE receptors). In the case of cell-free assays in which a membrane-bound form an isolated protein is used (e.g., a NEOKINE receptor) it may be desirable to utilize a solubilizing agent such that the membrane-bound form of the isolated protein is maintained in solution. Examples of such solubilizing agents include non-ionic detergents such as n-octylglucoside, n-dodecylglucoside, n-dodecylmaltoside, octanoyl-N-methylglucamide, decanoyl-N-methylglucamide, Triton® X-100, Triton® X-114, Thesit®, Isotridecypoly(ethylene glycol ether)n, 3-[(3-cholamidopropyl)dimethylamminio]-1-propane sulfonate (CHAPS), 34(3-cholamidopropyl)dimethylamminio]-2-hydroxy-1-propane sulfonate (CHAPSO), or N-dodecyl=N,N-dimethyl-3-ammonio-1-propane sulfonate.

[0912] In more than one embodiment of the above assay methods of the present invention, it may be desirable to immobilize either NEOKINE or its target molecule to facilitate separation of complexed from uncomplexed forms of one or both of the proteins, as well as to accommodate automation of the assay. Binding of a test compound to a NEOKINE protein, or interaction of a NEOKINE protein with a target molecule in the presence and absence of a candidate compound, can be accomplished in any vessel suitable for containing the reactants. Examples of such vessels include microtitre plates, test tubes, and micro-centrifuge tubes. In one embodiment, a fusion protein can be provided which adds a domain that allows one or both of the proteins to be bound to a matrix. For example, glutathione-S-transferase/NEOKINE fusion proteins or glutathione-S-transferase/target fusion proteins can be adsorbed onto glutathione sepharose beads (Sigma Chemical, St. Louis, Mo.) or glutathione derivatized microtitre plates, which are then combined with the test compound or the test compound and either the non-adsorbed target protein or NEOKINE protein, and the mixture incubated under conditions conducive to complex formation (e.g., at physiological conditions for salt and pH). Following incubation, the beads or microtitre plate wells are washed to remove any unbound components, the matrix immobilized in the case of beads, complex determined either directly or indirectly, for example, as described above. Alternatively, the complexes can be dissociated from the matrix, and the level of NEOKINE binding or activity determined using standard techniques.

[0913] Other techniques for immobilizing proteins on matrices can also be used in the screening assays of the invention. For example, either a NEOKINE protein or a NEOKINE target molecule can be immobilized utilizing conjugation of biotin and streptavidin. Biotinylated NEOKINE protein or target molecules can be prepared from biotin-NHS (N-hydroxy-succinimide) using techniques well known in the art (e.g., biotinylation kit, Pierce Chemicals, Rockford, Ill.), and immobilized in the wells of streptavidin-coated 96 well plates (Pierce Chemical). Alternatively, antibodies reactive with NEOKINE protein or target molecules but which do not interfere with binding of the NEOKINE protein to its target molecule can be derivatized to the wells of the plate, and unbound target or NEOKINE protein trapped in the wells by antibody conjugation. Methods for detecting such complexes, in addition to those described above for the GST-immobilized complexes, include immunodetection of complexes using antibodies reactive with the NEOKINE protein or target molecule, as well as enzyme-linked assays which rely on detecting an enzymatic activity associated with the NEOKINE protein or target molecule.

[0914] In another embodiment, modulators of NEOKINE expression are identified in a method wherein a cell is contacted with a candidate compound and the expression of NEOKINE mRNA or protein in the cell is determined. The level of expression of NEOKINE mRNA or protein in the presence of the candidate compound is compared to the level of expression of NEOKINE mRNA or protein in the absence of the candidate compound. The candidate compound can then be identified as a modulator of NEOKINE expression based on this comparison. For example, when expression of NEOKINE mRNA or protein is greater (statistically significantly greater) in the presence of the candidate compound than in its absence, the candidate compound is identified as a stimulator of NEOKINE mRNA or protein expression. Alternatively, when expression of NEOKINE mRNA or protein is less (statistically significantly less) in the presence of the candidate compound than in its absence, the candidate compound is identified as an inhibitor of NEOKINE mRNA or protein expression. The level of NEOKINE mRNA or protein expression in the cells can be determined by methods described herein for detecting NEOKINE mRNA or protein.

[0915] In yet another aspect of the invention, the NEOKINE proteins can be used as “bait proteins” in a two-hybrid assay or three-hybrid assay (see, e.g., U.S. Pat. No. 5,283,317; Zervos et al. (1993) Cell 72:223-232; Madura et al. (1993) J. Biol. Chem. 268:12046-12054; Bartel et al. (1993) Biotechniques 14:920-924; Iwabuchi et al. (1993) Oncogene 8:1693-1696; and Brent WO94/10300), to identify other proteins, which bind to or interact with NEOKINE (“NEOKINE-binding proteins” or “NEOKINE-bp”) and are involved in NEOKINE activity. Such NEOKINE-binding proteins are also likely to be involved in the propagation of signals by the NEOKINE proteins as, for example, downstream elements of a NEOKINE-mediated signaling pathway. Alternatively, such NEOKINE-binding proteins are likely to be cell-surface molecules associated with non-NEOKINE expressing cells, wherein such NEOKINE-binding proteins are involved in chemoattraction.

[0916] The two-hybrid system is based on the modular nature of most transcription factors, which consist of separable DNA-binding and activation domains. Briefly, the assay utilizes two different DNA constructs. In one construct, the gene that codes for a NEOKINE protein is fused to a gene encoding the DNA binding domain of a known transcription factor (e.g., GAL-4). In the other construct, a DNA sequence, from a library of DNA sequences, that encodes an unidentified protein (“prey” or “sample”) is fused to a gene that codes for the activation domain of the known transcription factor. If the “bait” and the “prey” proteins are able to interact, in vivo, forming a NEOKINE-dependent complex, the DNA-binding and activation domains of the transcription factor are brought into close proximity. This proximity allows transcription of a reporter gene (e.g., LacZ) which is operably linked to a transcriptional regulatory site responsive to the transcription factor. Expression of the reporter gene can be detected and cell colonies containing the functional transcription factor can be isolated and used to obtain the cloned gene which encodes the protein which interacts with the NEOKINE protein.

[0917] This invention further pertains to novel agents identified by the above-described screening assays. Accordingly, it is within the scope of this invention to further use an agent identified as described herein in an appropriate animal model. For example, an agent identified as described herein (e.g., a NEOKINE modulating agent, an antisense NEOKINE nucleic acid molecule, a NEOKINE-specific antibody, or a NEOKINE-binding partner) can be used in an animal model to determine the efficacy, toxicity, or side effects of treatment with such an agent. Alternatively, an agent identified as described herein can be used in an animal model to determine the mechanism of action of such an agent. Furthermore, this invention pertains to uses of novel agents identified by the above-described screening assays for treatments as described herein.

### FTHMA-070, Tango85, Tango77, SPOIL, NEOKINE, Tango129 or A259 Detection Assays

[0918] Portions or fragments of the cDNA sequences identified herein (and the corresponding complete gene sequences) can be used in numerous ways as polynucleotide reagents. For example, these sequences can be used to: (i) map their respective genes on a chromosome; and, thus, locate gene regions associated with genetic disease; (ii) identify an individual from a minute biological sample (tissue typing); and (iii) aid in forensic identification of a biological sample. These applications are described in the subsections below.

### FTHMA-070, Tango85, Tango77, SPOIL, NEOKINE, Tango129 or A259 Chromosome Mapping

[0919] Once the sequence (or a portion of the sequence) of a gene has been isolated, this sequence can be used to map the location of the gene on a chromosome. Accordingly, FTHMA-070, Tango85, Tango77, SPOIL, NEOKINE, Tango129 or A259 nucleic acid molecules described herein or fragments thereof, can be used to map the location of FTHMA-070, Tango85, Tango77, SPOIL, NEOKINE, Tango129 or A259 genes on a chromosome. The mapping of the FTHMA-070, Tango85, Tango77, SPOIL, NEOKINE, Tango129 or A259 sequences to chromosomes is an important first step in correlating these sequences with genes associated with disease.

[0920] Briefly, FTHMA-070, Tango85, Tango77, SPOIL, NEOKINE, Tango129 or A259 genes can be mapped to chromosomes by preparing PCR primers (preferably 15-25 by in length) from the FTHMA-070, Tango85, Tango77, SPOIL, NEOKINE, Tango129 or A259 sequences. Computer analysis of FTHMA-070, Tango85, Tango77, SPOIL, NEOKINE, Tango129 or A259 sequences can be used to rapidly select primers that do not span more than one exon in the genomic DNA, thus complicating the amplification process. These primers can then be used for PCR screening of somatic cell hybrids containing individual human chromosomes. Only those hybrids containing the human gene corresponding to the FTHMA-070, Tango85, Tango77, SPOIL, NEOKINE, Tango129 or A259 sequences will yield an amplified fragment.

[0921] Somatic cell hybrids are prepared by fusing somatic cells from different mammals (e.g., human and mouse cells). As hybrids of human and mouse cells grow and divide, they gradually lose human chromosomes in random order, but retain the mouse chromosomes. By using media in which mouse cells cannot grow, because they lack a particular enzyme, but human cells can, the one human chromosome that contains the gene encoding the needed enzyme, will be retained. By using various media, panels of hybrid cell lines can be established. Each cell line in a panel contains either a single human chromosome or a small number of human chromosomes, and a full set of mouse chromosomes, allowing easy mapping of individual genes to specific human chromosomes. (D'Eustachio et al. (1983) Science 220:919-924). Somatic cell hybrids containing only fragments of human chromosomes can also be produced by using human chromosomes with translocations and deletions.

[0922] PCR mapping of somatic cell hybrids is a rapid procedure for assigning a particular sequence to a particular chromosome. Three or more sequences can be assigned per day using a single thermal cycler. Using the FTHMA-070, Tango85, Tango77, SPOIL, NEOKINE, Tango129 or A259 sequences to design oligonucleotide primers, sublocalization can be achieved with panels of fragments from specific chromosomes. Other mapping strategies which can similarly be used to map a FTHMA-070, Tango85, Tango77, SPOIL, NEOKINE, Tango129 or A259 sequence to its chromosome include in situ hybridization (described in Fan et al. (1990) Proc. Natl. Acad. Sci. USA 87:6223-27), pre-screening with labeled flow-sorted chromosomes, and pre-selection by hybridization to chromosome specific cDNA libraries.

[0923] Fluorescence in situ hybridization (FISH) of a DNA sequence to a metaphase chromosomal spread can further be used to provide, a precise chromosomal location in one step. Chromosome spreads can be made using cells whose division has been blocked in metaphase by a chemical like colcemid that disrupts the mitotic spindle. The chromosomes can be treated briefly with trypsin, and then stained with Giemsa. A pattern of light and dark bands develops on each chromosome, so that the chromosomes can be identified individually. The FISH technique can be used with a DNA sequence as short as 500 or 600 bases. However, clones larger than 1,000 bases have a higher likelihood of binding to a unique chromosomal location with sufficient signal intensity for simple detection. Preferably 1,000 bases, and more preferably 2,000 bases will suffice to get good results at a reasonable amount of time. For a review of this technique, see Verma et al., Human Chromosomes: A Manual of Basic Techniques (Pergamon Press, New York, 1988).

[0924] Reagents for chromosome mapping can be used individually to mark a single chromosome or a single site on that chromosome, or panels of reagents can be used for marking multiple sites and/or multiple chromosomes. Reagents corresponding to noncoding regions of the genes actually are preferred for mapping purposes. Coding sequences are more likely to be conserved within gene families, thus increasing the chance of cross hybridizations during chromosomal mapping.

[0925] Once a sequence has been mapped to a precise chromosomal location, the physical position of the sequence on the chromosome can be correlated with genetic map data. (Such data are found, for example, in V. McKusick, Mendelian Inheritance in Man, available on-line through Johns Hopkins University Welch Medical Library). The relationship between genes and disease, mapped to the same chromosomal region, can then be identified through linkage analysis (co-inheritance of physically adjacent genes), described in, e.g., Egeland et al. (1987) Nature, 325:783-787.

[0926] Moreover, differences in the DNA sequences between individuals affected and unaffected with a disease associated with the FTHMA-070, Tango85, Tango77, SPOIL, NEOKINE, Tango129 or A259 gene can be determined. If a mutation is observed in some or all of the affected individuals but not in any unaffected individuals, then the mutation is likely to be the causative agent of the particular disease. Comparison of affected and unaffected individuals generally involves first looking for structural alterations in the chromosomes such as deletions or translocations that are visible from chromosome spreads or detectable using PCR based on that DNA sequence. Ultimately, complete sequencing of genes from several individuals can be performed to confirm the presence of a mutation and to distinguish mutations from polymorphisms.

### 2. FTHMA-070, Tango85, Tango77, SPOIL, NEOKINE, Tango129 or A259 Tissue Typing

[0927] The FTHMA-070, Tango85, Tango77, SPOIL, NEOKINE, Tango129 or A259 sequences of the present invention can also be used to identify individuals from minute biological samples. The United States military, for example, is considering the use of restriction fragment length polymorphism (RFLP) for identification of its personnel. In this technique, an individual's genomic DNA is digested with one or more restriction enzymes, and probed on a Southern blot to yield unique bands for identification. This method does not suffer from the current limitations of “Dog Tags” which can be lost, switched, or stolen, making positive identification difficult. The sequences of the present invention are useful as additional DNA markers for RFLP (described in U.S. Pat. No. 5,272,057).

[0928] Furthermore, the sequences of the present invention can be used to provide an alternative technique which determines the actual base-by-base DNA sequence of selected portions of an individual's genome. Thus, the FTHMA-070, Tango85, Tango77, SPOIL, NEOKINE, Tango129 or A259 sequences described herein can be used to prepare two PCR primers from the 5′ and 3′ ends of the sequences. These primers can then be used to amplify an individual's DNA and subsequently sequence it.

[0929] Panels of corresponding DNA sequences from individuals, prepared in this manner, can provide unique individual identifications, as each individual will have a unique set of such DNA sequences due to allelic differences. The sequences of the present invention can be used to obtain such identification sequences from individuals and from tissue. The FTHMA-070, Tango85, Tango77, SPOIL, NEOKINE, Tango129 or A259 sequences of the invention uniquely represent portions of the human genome. Allelic variation occurs to some degree in the coding regions of these sequences, and to a greater degree in the noncoding regions. It is estimated that allelic variation between individual humans occurs with a frequency of about once per each 500 bases. Each of the sequences described herein can, to some degree, be used as a standard against which DNA from an individual can be compared for identification purposes. Because greater numbers of polymorphisms occur in the noncoding regions, fewer sequences are necessary to differentiate individuals. The noncoding sequences of SEQ ID NO:53, 57, 71, 89, 101, 16, 112, 115, 137, 145 or 163 can comfortably provide positive individual identification with a panel of perhaps 10 to 1,000 primers which each yield a noncoding amplified sequence of 100 bases. If predicted coding sequences, such as those in SEQ ID NO:55, 59, 73, 76, 80, 91, 103, 106, 117, 139, 146 or 164 are used, a more appropriate number of primers for positive individual identification would be 500-2,000.

[0930] If a panel of reagents from FTHMA-070, Tango85, Tango77, SPOIL, NEOKINE, Tango129 or A259 sequences described herein is used to generate a unique identification database for an individual, those same reagents can later be used to identify tissue from that individual. Using the unique identification database, positive identification of the individual, living or dead, can be made from extremely small tissue samples.

### 3. Use of Partial FTHMA-070, Tango85, Tango77, SPOIL, NEOKINE, Tango129 or A259

### Sequences in Forensic Biology

[0931] DNA-based identification techniques can also be used in forensic biology. Forensic biology is a scientific field employing genetic typing of biological evidence found at a crime scene as a means for positively identifying, for example, a perpetrator of a crime. To make such an identification, PCR technology can be used to amplify DNA sequences taken from very small biological samples such as tissues, e.g., hair or skin, or body fluids, e.g., blood, saliva, or semen found at a crime scene. The amplified sequence can then be compared to a standard, thereby allowing identification of the origin of the biological sample.

[0932] The sequences of the present invention can be used to provide polynucleotide reagents, e.g., PCR primers, targeted to specific loci in the human genome, which can enhance the reliability of DNA-based forensic identifications by, for example, providing another “identification marker” (i.e. another DNA sequence that is unique to a particular individual). As mentioned above, actual base sequence information can be used for identification as an accurate alternative to patterns formed by restriction enzyme generated fragments. Sequences targeted to noncoding regions are particularly appropriate for this use as greater numbers of polymorphisms occur in the noncoding regions, making it easier to differentiate individuals using this technique. Examples of polynucleotide reagents include the FTHMA-070, T85 or A259 sequences or portions thereof, e.g., fragments derived from the noncoding regions having a length of at least 20 or 30 bases.

[0933] The sequences of the present invention can be used to provide polynucleotide reagents, e.g., PCR primers, targeted to specific loci in the human genome, which can enhance the reliability of DNA-based forensic identifications by, for example, providing another “identification marker” (i.e. another DNA sequence that is unique to a particular individual). As mentioned above, actual base sequence information can be used for identification as an accurate alternative to patterns formed by restriction enzyme generated fragments. Sequences targeted to noncoding regions of SEQ ID NO:71, SEQ ID NO:89, SEQ ID NO:101, or SEQ ID NO:104, SEQ ID NO:112, SEQ ID NO:115 are particularly appropriate for this use as greater numbers of polymorphisms occur in the noncoding regions, making it easier to differentiate individuals using this technique. Examples of polynucleotide reagents include the Tango77, SPOIL, NEOKINE or Tango129 nucleotide sequences or portions thereof, e.g., fragments derived from the noncoding regions of SEQ ID NO:71, SEQ ID NO:89, SEQ ID NO:101, or SEQ ID NO:104, SEQ ID NO:112, SEQ ID NO:115 having a length of at least 20 bases, preferably at least 30 bases.

[0934] The FTHMA-070, Tango85, Tango77, SPOIL, NEOKINE, Tango129 or A259 sequences described herein can further be used to provide polynucleotide reagents, e.g., labeled or labelable probes which can be used in, for example, an in situ hybridization technique, to identify a specific tissue, e.g., brain tissue. This can be very useful in cases where a forensic pathologist is presented with a tissue of unknown origin. Panels of such FTHMA-070, Tango85, Tango77, SPOIL, NEOKINE, Tango129 or A259 probes can be used to identify tissue by species and/or by organ type.

[0935] In a similar fashion, these reagents, e.g., FTHMA-070, Tango85, Tango77, SPOIL, NEOKINE, Tango129 or A259 primers or probes can be used to screen tissue culture for contamination (i.e., screen for the presence of a mixture of different types of cells in a culture).

### FTHMA-070, Tango85, Tango77, SPOIL, NEOKINE, Tango129 or A259 Predictive Medicine

[0936] The present invention also pertains to the field of predictive medicine in which diagnostic assays, prognostic assays, pharmacogenomics, and monitoring clinical trails are used for prognostic (predictive) purposes to thereby treat an individual prophylactically. Accordingly, one aspect of the present invention relates to diagnostic assays for determining FTHMA-070, Tango85, Tango77, SPOIL, NEOKINE, Tango129 or A259 protein and/or nucleic acid expression as well as FTHMA-070, Tango85, Tango77, SPOIL, NEOKINE, Tango129 or A259 activity, in the context of a biological sample (e.g., blood, serum, cells, tissue) to thereby determine whether an individual is afflicted with a disease or disorder, or is at risk of developing a disorder, associated with aberrant FTHMA-070, Tango85, Tango77, SPOIL, NEOKINE, Tango129 or A259 expression or activity. The invention also provides for prognostic (or predictive) assays for determining whether an individual is at risk of developing a disorder associated with FTHMA-070, Tango85, Tango77, SPOIL, NEOKINE, Tango129 or A259 protein, nucleic acid expression or activity. For example, mutations in a FTHMA-070, Tango85, Tango77, SPOIL, NEOKINE, Tango129 or A259 gene can be assayed in a biological sample. Such assays can be used for prognostic or predictive purpose to thereby prophylactically treat an individual prior to the onset of a disorder characterized by or associated with FTHMA-070, Tango85, Tango77, SPOIL, NEOKINE, Tango129 or A259 protein, nucleic acid expression or activity.

[0937] Another aspect of the invention provides methods for determining FTHMA-070, Tango85, Tango77, SPOIL, NEOKINE, Tango129 or A259 protein, nucleic acid expression or FTHMA-070, Tango85, Tango77, SPOIL, NEOKINE, Tango129 or A259 activity in an individual to thereby select appropriate therapeutic or prophylactic agents for that individual (referred to herein as “pharmacogenomics”). Pharmacogenomics allows for the selection of agents (e.g., drugs) for therapeutic or prophylactic treatment of an individual based on the genotype of the individual (e.g., the genotype of the individual examined to determine the ability of the individual to respond to a particular agent.)

[0938] Yet another aspect of the invention pertains to monitoring the influence of agents (e.g., drugs or other compounds) on the expression or activity of FTHMA-070, Tango85, Tango77, SPOIL, NEOKINE, Tango129 or A259 in clinical trials.

[0939] These and other agents are described in further detail in the following sections.

### FTHMA-070, Tango85, Tango77, SPOIL, NEOKINE, Tango129 or A259 Diagnostic Assays

[0940] An exemplary method for detecting the presence or absence of FTHMA-070, Tango85, Tango77, SPOIL, NEOKINE, Tango129 or A259 in a biological sample involves obtaining a biological sample from a test subject and contacting the biological sample with a compound or an agent capable of detecting FTHMA-070, Tango85, Tango77, SPOIL, NEOKINE, Tango129 or A259 protein or nucleic acid (e.g., mRNA, genomic DNA) that encodes FTHMA-070, Tango85, Tango77, SPOIL, NEOKINE, Tango129 or A259 protein such that the presence of FTHMA-070, Tango85, Tango77, SPOIL, NEOKINE, Tango129 or A259 is detected in the biological sample. A preferred agent for detecting FTHMA-070, Tango85, Tango77, SPOIL, NEOKINE, Tango129 or A259 mRNA or genomic DNA is a labeled nucleic acid probe capable of hybridizing to FTHMA-070, Tango85, Tango77, SPOIL, NEOKINE, Tango129 or A259 mRNA or genomic DNA. The nucleic acid probe can be, for example, a full-length FTHMA-070, Tango85, Tango77, SPOIL, NEOKINE, Tango 129 or A259 nucleic acid, such as the nucleic acid of SEQ ID NO:53, 55, 57, 58, 71, 73, 76, 80, 89, 101, 104, 112, 115, 118, 121, 124, 137, 139, 145, 146, 163 or 164, or the DNA insert of the plasmid deposited with ATCC as Accession Number 98751, or a portion thereof, such as an oligonucleotide of at least 15, 30, 50, 100, 250 or 500 nucleotides in length and sufficient to specifically hybridize under stringent conditions to FTHMA-070, Tango85, Tango77, SPOIL, NEOKINE, Tango129 or A259 mRNA or genomic DNA. Other suitable probes for use in the diagnostic assays of the invention are described herein.

[0941] A preferred agent for detecting FTHMA-070, Tango85, Tango77, SPOIL, NEOKINE, Tango129 or A259 protein is an antibody capable of binding to FTHMA-070, Tango85, Tango77, SPOIL, NEOKINE, Tango129 or A259 protein, preferably an antibody with a detectable label. Antibodies can be polyclonal, or more preferably, monoclonal. An intact antibody, or a fragment thereof (e.g., Fab or F(ab′)₂) can be used. The term “labeled”, with regard to the probe or antibody, is intended to encompass direct labeling of the probe or antibody by coupling (i.e., physically linking) a detectable substance to the probe or antibody, as well as indirect labeling of the probe or antibody by reactivity with another reagent that is directly labeled. Examples of indirect labeling include detection of a primary antibody using a fluorescently labeled secondary antibody and end-labeling of a DNA probe with biotin such that it can be detected with fluorescently labeled streptavidin. The term “biological sample” is intended to include tissues, cells and biological fluids isolated from a subject, as well as tissues, cells and fluids present within a subject. That is, the detection method of the invention can be used to detect FTHMA-070, Tango85, Tango77, SPOIL, NEOKINE, Tango129 or A259 mRNA, protein, or genomic DNA in a biological sample in vitro as well as in vivo. For example, in vitro techniques for detection of FTHMA-070, Tango85, Tango77, SPOIL, NEOKINE, Tango129 or A259 mRNA include Northern hybridizations and in situ hybridizations. In vitro techniques for detection of FTHMA-070, Tango85, Tango77, SPOIL, NEOKINE, Tango129 or A259 protein include enzyme linked immunosorbent assays (ELISAs), Western blots, immunoprecipitations and immunofluorescence. In vitro techniques for detection of FTHMA-070, Tango85, Tango77, SPOIL, NEOKINE, Tango129 or A259 genomic DNA include Southern hybridizations. Furthermore, in vivo techniques for detection of FTHMA-070, Tango85, Tango77, SPOIL, NEOKINE, Tango129 or A259 protein include introducing into a subject a labeled anti-FTHMA-070, Tango85, Tango77, SPOIL, NEOKINE, Tango129 or A259 antibody. For example, the antibody can be labeled with a radioactive marker whose presence and location in a subject can be detected by standard imaging techniques.

[0942] In one embodiment, the biological sample contains protein molecules from the test subject. Alternatively, the biological sample can contain mRNA molecules from the test subject or genomic DNA molecules from the test subject. A preferred biological sample is a peripheral blood leukocyte sample isolated by conventional means from a subject.

[0943] In another embodiment, the methods further involve obtaining a control biological sample from a control subject, contacting the control sample with a compound or agent capable of detecting FTHMA-070, Tango85, Tango77, SPOIL, NEOKINE, Tango129 or A259 protein, mRNA, or genomic DNA, such that the presence of FTHMA-070, Tango85, Tango77, SPOIL, NEOKINE, Tango129 or A259 protein, mRNA or genomic DNA is detected in the biological sample, and comparing the presence of FTHMA-070, Tango85, Tango77, SPOIL, NEOKINE, Tango129 or A259 protein, mRNA or genomic DNA in the control sample with the presence of FTHMA-070, Tango85, Tango77, SPOIL, NEOKINE, Tango129 or A259 protein, mRNA or genomic DNA in the test sample.

[0944] The invention also encompasses kits for detecting the presence of FTHMA-070, Tango85, Tango77, SPOIL, NEOKINE, Tango129 or A259 in a biological sample (a test sample). Such kits can be used to determine if a subject is suffering from or is at increased risk of developing a disorder associated with aberrant expression of FTHMA-070, Tango85, Tango77, SPOIL, NEOKINE, Tango129 or A259 (e.g., an immunological disorder or proliferative disorder, e.g., psoriasis or cancer). For example, the kit can comprise a labeled compound or agent capable of detecting FTHMA-070, Tango85, Tango77, SPOIL, NEOKINE, Tango129 or A259 protein or mRNA in a biological sample and means for determining the amount of FTHMA-070, Tango85, Tango77, SPOIL, NEOKINE, Tango129 or A259 in the sample (e.g., an anti-FTHMA-070, Tango85, Tango77, SPOIL, NEOKINE, Tango129 or A259 antibody or an oligonucleotide probe which binds to DNA encoding FTHMA-070, Tango85, Tango77, SPOIL, NEOKINE, Tango129 or A259). Kits may also include instruction for observing that the tested subject is suffering from or is at risk of developing a disorder associated with aberrant expression of FTHMA-070, Tango85, Tango77, SPOIL, NEOKINE, Tango129 or A259 if the amount of FTHMA-070, Tango85, Tango77, SPOIL, NEOKINE, Tango129 or A259 protein or mRNA is above or below a normal level.

[0945] For antibody-based kits, the kit may comprise, for example: (1) a first antibody (e.g., attached to a solid support) which binds to FTHMA-070, Tango85, Tango77, SPOIL, NEOKINE, Tango129 or A259 protein; and, optionally, (2) a second, different antibody which binds to FTHMA-070, Tango85, Tango77, SPOIL, NEOKINE, Tango129 or A259 protein or the first antibody and is conjugated to a detectable agent.

[0946] For oligonucleotide-based kits, the kit may comprise, for example: (1) a oligonucleotide, e.g., a detectably labelled oligonucleotide, which hybridizes to a FTHMA-070, Tango85, Tango77, SPOIL, NEOKINE, Tango129 or A259 nucleic acid sequence or (2) a pair of primers useful for amplifying a FTHMA-070, Tango85, Tango77, SPOIL, NEOKINE, Tango129 or A259 nucleic acid molecule;

[0947] The kit may also comprise, e.g., a buffering agent, a preservative, or a protein stabilizing agent. The kit may also comprise components necessary for detecting the detectable agent (e.g., an enzyme or a substrate). The kit may also contain a control sample or a series of control samples which can be assayed and compared to the test sample contained. Each component of the kit is usually enclosed within an individual container and all of the various containers are within a single package along with instructions for observing whether the tested subject is suffering from or is at risk of developing a disorder associated with aberrant expression of FTHMA-070, Tango85, Tango77, SPOIL, NEOKINE, Tango 129 or A259.

### FTHMA-070, Tango85, Tango77, SPOIL, NEOKINE, Tango129 or A259 Prognostic Assays

[0948] The methods described herein can furthermore be utilized as diagnostic or prognostic assays to identify subjects having or at risk of developing a disease or disorder associated with aberrant FTHMA-070, Tango85, Tango77 or Tango129 expression or activity. For example, the assays described herein, such as the preceding diagnostic assays or the following assays, can be utilized to identify a subject having or at risk of developing a disorder associated with FTHMA-070, Tango85, Tango77 or Tango129 protein, nucleic acid expression or activity such as an immune system disorder. Alternatively, the prognostic assays can be utilized to identify a subject having or at risk for developing such a disease or disorder. Thus, the present invention provides a method in which a test sample is obtained from a subject and FTHMA-070, Tango85, Tango77 or Tango129 protein or nucleic acid (e.g., mRNA, genomic DNA) is detected, wherein the presence of FTHMA-070, Tango85, Tango77 or Tango129 protein or nucleic acid is diagnostic for a subject having or at risk of developing a disease or disorder associated with aberrant FTHMA-070, Tango85, Tango77 or Tango129 expression or activity. As used herein, a “test sample” refers to a biological sample obtained from a subject of interest. For example, a test sample can be a biological fluid (e.g., serum), cell sample, or tissue.

[0949] The diagnostic methods described herein can furthermore be utilized to identify subjects having or at risk of developing a disease or disorder associated with aberrant SPOIL and/or IL-1 expression or activity. For example, the assays described herein, such as the preceding diagnostic assays or the following assays, can be utilized to identify a subject having or at risk of developing a disorder associated with aberrant SPOIL protein, nucleic acid expression or activity and/or characterized by aberrant IL-1 expression or activity such as an inflammatory disorder, an immune disorder, or a differentiative disorder (e.g., a bone metabolism disorder). Alternatively, the prognostic assays can be utilized to identify a subject having or at risk for developing a differentiative or proliferative disease (e.g., leukemia), an inflammatory disease, or an immune disease. Thus, the present invention provides a method for identifying a disease or disorder associated with SPOIL and/or IL-1 expression or activity in which a test sample is obtained from a subject and SPOIL protein or nucleic acid (e.g, mRNA, genomic DNA) is detected, wherein the presence of SPOIL protein or nucleic acid is diagnostic for a subject having or at risk of developing a disease or disorder characterized aberrant SPOIL and/or IL-1 expression or activity. As used herein, a “test sample” refers to a biological sample obtained from a subject of interest. For example, a test sample can be a biological fluid (e.g., serum), cell sample, or tissue.

[0950] The diagnostic methods described herein can furthermore be utilized to identify subjects having or at risk of developing a disease or disorder associated with aberrant NEOKINE expression or activity. For example, the assays described herein, such as the preceding diagnostic assays or the following assays, can be utilized to identify a subject having or at risk of developing a disorder associated with NEOKINE protein, nucleic acid expression or activity such as an inflammatory disorder. Alternatively, the prognostic assays can be utilized to identify a subject having or at risk for developing an inflammatory disorder. Thus, the present invention provides a method for identifying a disease or disorder associated with aberrant NEOKINE expression or activity in which a test sample is obtained from a subject and NEOKINE protein or nucleic acid (e.g, mRNA, genomic DNA) is detected, wherein the presence of NEOKINE protein or nucleic acid is diagnostic for a subject having or at risk of developing a disease or disorder associated with aberrant NEOKINE expression or activity. As used herein, a “test sample” refers to a biological sample obtained from a subject of interest. For example, a test sample can be a biological fluid (e.g., serum), cell sample, or tissue.

[0951] The methods described herein can furthermore be utilized as diagnostic or prognostic assays to identify subjects having or at risk of developing a disease or disorder associated with aberrant expression or activity of a A259 polypeptide of the invention. For example, the assays described herein, such as the preceding diagnostic assays or the following assays, can be utilized to identify a subject having or at risk of developing a disorder associated with aberrant expression or activity of a A259 polypeptide of the invention, e.g., an immunologic disorder, e.g., asthma, anaphylaxis, or atopic dermatitis. Alternatively, the prognostic assays can be utilized to identify a subject having or at risk for developing such a disease or disorder. Thus, the present invention provides a method in which a test sample is obtained from a subject and a A259 polypeptide or nucleic acid (e.g., mRNA, genomic DNA) of the invention is detected, wherein the presence of the A259 polypeptide or nucleic acid is diagnostic for a subject having or at risk of developing a disease or disorder associated with aberrant expression or activity of the A259 polypeptide. As used herein, a “test sample” refers to a biological sample obtained from a subject of interest. For example, a test sample can be a biological fluid (e.g., serum), cell sample, or tissue.

[0952] Furthermore, the prognostic assays described herein can be used to determine whether a subject can be administered an agent (e.g., an agonist, antagonist, peptidomimetic, protein, peptide, nucleic acid, small molecule, or other drug candidate) to treat a disease or disorder associated with aberrant FTHMA-070, Tango85, Tango77, SPOIL, NEOKINE, Tango129 or A259 expression or activity. For example, such methods can be used to determine whether a subject can be effectively treated with a specific agent or class of agents (e.g., agents of a type which decrease FTHMA-070, Tango85, Tango77, SPOIL, NEOKINE, Tango129 or A259 activity). Thus, the present invention provides methods for determining whether a subject can be effectively treated with an agent for a disorder associated with aberrant FTHMA-070, Tango85, Tango77, SPOIL, NEOKINE, Tango129 or A259 expression or activity in which a test sample is obtained and FTHMA-070, Tango85, Tango77, SPOIL, NEOKINE, Tango129 or A259 protein or nucleic acid is detected (e.g., wherein the presence of FTHMA-070, Tango85, Tango77, SPOIL, NEOKINE, Tango129 or A259 protein or nucleic acid is diagnostic for a subject that can be administered the agent to treat a disorder associated with aberrant FTHMA-070, Tango85, Tango77, SPOIL, NEOKINE, Tango129 or A259 expression or activity).

[0953] The methods of the invention can also be used to detect genetic lesions or mutations in a FTHMA-070, Tango85, Tango77, SPOIL, NEOKINE, Tango129 or A259 gene, thereby determining if a subject with the lesioned gene is at risk for a disorder characterized by aberrant cell proliferation and/or differentiation. In preferred embodiments, the methods include detecting, in a sample of cells from the subject, the presence or absence of a genetic lesion characterized by at least one of an alteration affecting the integrity of a gene encoding a FTHMA-070, Tango85, Tango77, SPOIL, NEOKINE, Tango129 or A259-protein, or the mis-expression of the FTHMA-070, Tango85, Tango77, SPOIL, NEOKINE, Tango129 or A259 gene. For example, such genetic lesions can be detected by ascertaining the existence of at least one of 1) a deletion of one or more nucleotides from a FTHMA-070, Tango85, Tango77, SPOIL, NEOKINE, Tango129 or A259 gene; 2) an addition of one or more nucleotides to a FTHMA-070, Tango85, Tango77, SPOIL, NEOKINE, Tango129 or A259 gene; 3) a substitution of one or more nucleotides of a FTHMA-070, Tango85, Tango77, SPOIL, NEOKINE, Tango129 or A259 gene, 4) a chromosomal rearrangement of a FTHMA-070, Tango85, Tango77, SPOIL, NEOKINE, Tango129 or A259 gene; 5) an alteration in the level of a messenger RNA transcript of a FTHMA-070, Tango85, Tango77, SPOIL, NEOKINE, Tango129 or A259 gene, 6) aberrant modification of a FTHMA-070, Tango85, Tango77, SPOIL, NEOKINE, Tango129 or A259 gene, such as of the methylation pattern of the genomic DNA, 7) the presence of a non-wild type splicing pattern of a messenger RNA transcript of a FTHMA-070, Tango85, Tango77, SPOIL, NEOKINE, Tango 129 or A259 gene, 8) a non-wild type level of a FTHMA-070, Tango85, Tango77, SPOIL, NEOKINE, Tango129 or A259-protein, 9) allelic loss of a FTHMA-070, Tango85, Tango77, SPOIL, NEOKINE, Tango129 or A259 gene, and 10) inappropriate post-translational modification of a FTHMA-070, Tango85, Tango77, SPOIL, NEOKINE, Tango129 or A259-protein. As described herein, there are a large number of assay techniques known in the art which can be used for detecting lesions in a FTHMA-070, Tango85, Tango77, SPOIL, NEOKINE, Tango129 or A259 gene. A preferred biological sample is a peripheral blood leukocyte sample isolated by conventional means from a subject.

[0954] In certain embodiments, detection of the lesion involves the use of a probe/primer in a polymerase chain reaction (PCR) (see, e.g., U.S. Pat. Nos. 4,683,195 and 4,683,202), such as anchor PCR or RACE PCR, or, alternatively, in a ligation chain reaction (LCR) (see, e.g., Landegran et al. (1988) Science 241:1077-1080; and Nakazawa et al. (1994) Proc. Natl. Acad. Sci. USA 91:360-364), the latter of which can be particularly useful for detecting point mutations in the FTHMA-070, Tango85, Tango77, SPOIL, NEOKINE, Tango129 or A259-gene (see Abravaya et al. (1995) Nucleic Acids Res. 23:675-682). This method can include the steps of collecting a sample of cells from a patient, isolating nucleic acid (e.g., genomic, mRNA or both) from the cells of the sample, contacting the nucleic acid sample with one or more primers which specifically hybridize to a FTHMA-070, Tango85, Tango77, SPOIL, NEOKINE, Tango129 or A259 gene under conditions such that hybridization and amplification of the FTHMA-070, Tango85, Tango77, SPOIL, NEOKINE, Tango129 or A259-gene (if present) occurs, and detecting the presence or absence of an amplification product, or detecting the size of the amplification product and comparing the length to a control sample. It is anticipated that PCR and/or LCR may be desirable to use as a preliminary amplification step in conjunction with any of the techniques used for detecting mutations described herein.

[0955] Alternative amplification methods include: self sustained sequence replication (Guatelli et al. (1990) Proc. Natl. Acad. Sci. USA 87:1874-1878), transcriptional amplification system (Kwoh, et al. (1989) Proc. Natl. Acad. Sci. USA 86:1173-1177), Q-Beta Replicase (Lizardi et al. (1988) Bio/Technology 6:1197), or any other nucleic acid amplification method, followed by the detection of the amplified molecules using techniques well known to those of skill in the art. These detection schemes are especially useful for the detection of nucleic acid molecules if such molecules are present in very low numbers.

[0956] In an alternative embodiment, mutations in a FTHMA-070, Tango85, Tango77, SPOIL, NEOKINE, Tango129 or A259 gene from a sample cell can be identified by alterations in restriction enzyme cleavage patterns. For example, sample and control DNA is isolated, amplified (optionally), digested with one or more restriction endonucleases, and fragment length sizes are determined by gel electrophoresis and compared. Differences in fragment length sizes between sample and control DNA indicates mutations in the sample DNA. Moreover, the use of sequence specific ribozymes (see, e.g., U.S. Pat. No. 5,498,531) can be used to score for the presence of specific mutations by development or loss of a ribozyme cleavage site.

[0957] In other embodiments, genetic mutations in FTHMA-070, Tango85, Tango77, SPOIL, NEOKINE, Tango129 or A259 can be identified by hybridizing a sample and control nucleic acids, e.g., DNA or RNA, to high density arrays containing hundreds or thousands of oligonucleotides probes (Cronin et al. (1996) Human Mutation 7:244-255; Kozal et al. (1996) Nature Medicine 2:753-759). For example, genetic mutations in FTHMA-070, Tango85, Tango77, SPOIL, NEOKINE, Tango129 or A259 can be identified in two-dimensional arrays containing light-generated DNA probes as described in Cronin et al. supra. Briefly, a first hybridization array of probes can be used to scan through long stretches of DNA in a sample and control to identify base changes between the sequences by making linear arrays of sequential overlapping probes. This step allows the identification of point mutations. This step is followed by a second hybridization array that allows the characterization of specific mutations by using smaller, specialized probe arrays complementary to all variants or mutations detected. Each mutation array is composed of parallel probe sets, one complementary to the wild-type gene and the other complementary to the mutant gene.

[0958] In yet another embodiment, any of a variety of sequencing reactions known in the art can be used to directly sequence the FTHMA-070, Tango85, Tango77, SPOIL, NEOKINE, Tango 129 or A259 gene and detect mutations by comparing the sequence of the sample FTHMA-070, Tango85, Tango77, SPOIL, NEOKINE, Tango129 or A259 with the corresponding wild-type (control) sequence. Examples of sequencing reactions include those based on techniques developed by Maxim and Gilbert ((1977) Proc. Natl. Acad. Sci. USA 74:560) or Sanger ((1977) Proc. Natl. Acad. Sci. USA 74:5463). It is also contemplated that any of a variety of automated sequencing procedures can be utilized when performing the diagnostic assays ((1995) Bio/Techniques 19:448), including sequencing by mass spectrometry (see, e.g., PCT Publication No. WO 94/16101; Cohen et al. (1996) Adv. Chromatogr. 36:127-162; and Griffin et al. (1993) Appl. Biochem. Biotechnol. 38:147-159).

[0959] Other methods for detecting mutations in the FTHMA-070, Tango85, Tango77, SPOIL, NEOKINE, Tango129 or A259 gene include methods in which protection from cleavage agents is used to detect mismatched bases in RNA/RNA or RNA/DNA heteroduplexes (Myers et al. (1985) Science 230:1242). In general, the art technique of “mismatch cleavage” starts by providing heteroduplexes of formed by hybridizing (labeled) RNA or DNA containing the wild-type FTHMA-070, Tango85, Tango77, SPOIL, NEOKINE, Tango129 or A259 sequence with potentially mutant RNA or DNA obtained from a tissue sample. The double-stranded duplexes are treated with an agent which cleaves single-stranded regions of the duplex such as which will exist due to basepair mismatches between the control and sample strands. For instance, RNA/DNA duplexes can be treated with RNase and DNA/DNA hybrids treated with S1 nuclease to enzymatically digesting the mismatched regions. In other embodiments, either DNA/DNA or RNA/DNA duplexes can be treated with hydroxylamine or osmium tetroxide and with piperidine in order to digest mismatched regions. After digestion of the mismatched regions, the resulting material is then separated by size on denaturing polyacrylamide gels to determine the site of mutation. See, e.g., Cotton et al (1988) Proc. Natl Acad Sci USA 85:4397; Saleeba et al (1992) Methods Enzymol. 217:286-295. In a preferred embodiment, the control DNA or RNA can be labeled for detection.

[0960] In still another embodiment, the mismatch cleavage reaction employs one or more proteins that recognize mismatched base pairs in double-stranded DNA (so called “DNA mismatch repair” enzymes) in defined systems for detecting and mapping point mutations in FTHMA-070, Tango85, Tango77, SPOIL, NEOKINE, Tango129 or A259 cDNAs obtained from samples of cells. For example, the mutY enzyme of E. coli cleaves A at G/A mismatches and the thymidine DNA glycosylase from HeLa cells cleaves Tat G/T mismatches (Hsu et al. (1994) Carcinogenesis 15:1657-1662). According to an exemplary embodiment, a probe based on a FTHMA-070, Tango85, Tango77, SPOIL, NEOKINE, Tango129 or A259 sequence, e.g., a wild-type FTHMA-070, Tango85, Tango77, SPOIL, NEOKINE, Tango129 or A259 sequence, is hybridized to a cDNA or other DNA product from a test cell(s). The duplex is treated with a DNA mismatch repair enzyme, and the cleavage products, if any, can be detected from electrophoresis protocols or the like. See, e.g., U.S. Pat. No. 5,459,039.

[0961] In other embodiments, alterations in electrophoretic mobility will be used to identify mutations in FTHMA-070, Tango85, Tango77, SPOIL, NEOKINE, Tango129 or A259 genes. For example, single strand conformation polymorphism (SSCP) may be used to detect differences in electrophoretic mobility between mutant and wild type nucleic acids (Orita et al. (1989) Proc Natl. Acad. Sci. USA: 86:2766, see also Cotton (1993) Mutat. Res. 285:125-144; and Hayashi (1992) Genet Anal Tech Appl 9:73-79). Single-stranded DNA fragments of sample and control FTHMA-070, Tango85, Tango77, SPOIL, NEOKINE, Tango129 or A259 nucleic acids will be denatured and allowed to renature. The secondary structure of single-stranded nucleic acids varies according to sequence, the resulting alteration in electrophoretic mobility enables the detection of even a single base change. The DNA fragments may be labeled or detected with labeled probes. The sensitivity of the assay may be enhanced by using RNA (rather than DNA), in which the secondary structure is more sensitive to a change in sequence. In a preferred embodiment, the subject method utilizes heteroduplex analysis to separate double stranded heteroduplex molecules on the basis of changes in electrophoretic mobility (Keen et al. (1991) Trends Genet. 7:5).

[0962] In yet another embodiment, the movement of mutant or wild-type fragments in polyacrylamide gels containing a gradient of denaturant is assayed using denaturing gradient gel electrophoresis (DGGE) (Myers et al. (1985) Nature 313:495). When DGGE is used as the method of analysis, DNA will be modified to insure that it does not completely denature, for example by adding a GC clamp of approximately 40 by of high-melting GC-rich DNA by PCR. In a further embodiment, a temperature gradient is used in place of a denaturing gradient to identify differences in the mobility of control and sample DNA (Rosenbaum and Reissner (1987) Biophys Chem 265:12753).

[0963] Examples of other techniques for detecting point mutations include, but are not limited to, selective oligonucleotide hybridization, selective amplification, or selective primer extension. For example, oligonucleotide primers may be prepared in which the known mutation is placed centrally and then hybridized to target DNA under conditions which permit hybridization only if a perfect match is found (Saiki et al. (1986) Nature 324:163); Saiki et al. (1989) Proc. Natl. Acad. Sci. USA 86:6230). Such allele specific oligonucleotides are hybridized to PCR amplified target DNA or a number of different mutations when the oligonucleotides are attached to the hybridizing membrane and hybridized with labeled target DNA.

[0964] Alternatively, allele specific amplification technology which depends on selective PCR amplification may be used in conjunction with the instant invention. Oligonucleotides used as primers for specific amplification may carry the mutation of interest in the center of the molecule (so that amplification depends on differential hybridization) (Gibbs et al. (1989) Nucleic Acids Res. 17:2437-2448) or at the extreme 3′ end of one primer where, under appropriate conditions, mismatch can prevent, or reduce polymerase extension (Prossner (1993) Tibtech 11:238). In addition, it may be desirable to introduce a novel restriction site in the region of the mutation to create cleavage-based detection (Gasparini et al. (1992) Mol. Cell. Probes 6:1). It is anticipated that in certain embodiments amplification may also be performed using Taq ligase for amplification (Barany (1991) Proc. Natl. Acad. Sci. USA 88:189). In such cases, ligation will occur only if there is a perfect match at the 3′ end of the 5′ sequence making it possible to detect the presence of a known mutation at a specific site by looking for the presence or absence of amplification.

[0965] The methods described herein may be performed, for example, by utilizing pre-packaged diagnostic kits comprising at least one probe nucleic acid or antibody reagent described herein, which may be conveniently used, e.g., in clinical settings to diagnose patients exhibiting symptoms or family history of a disease or illness involving a FTHMA-070, Tango85, Tango77, SPOIL, NEOKINE, Tango129 or A259 gene.

[0966] Furthermore, any cell type or tissue, e.g., chondrocytes, or peripheral blood leukocytes, in which FTHMA-070, Tango85, Tango77, SPOIL, NEOKINE, Tango129 or A259 is expressed may be utilized in the prognostic assays described herein.

### FTHMA-070, Tango85, Tango77, SPOIL, NEOKINE, Tango129 or A259 Pharmacogenomics

[0967] Agents, or modulators which have a stimulatory or inhibitory effect on FTHMA-070, T85 or A259 activity (e.g., FTHMA-070, T85 or A259 gene expression) as identified by a screening assay described herein can be administered to individuals to treat (prophylactically or therapeutically) disorders (e.g., an immunological disorder) associated with aberrant FTHMA-070, T85 or A259 activity. Agents, or modulators which have a stimulatory or inhibitory effect on Tango-77 activity (e.g., Tango-77 gene expression) as identified by a screening assay described herein can be administered to individuals to treat (prophylactically or therapeutically) disorders (e.g., acute or chronic inflammation and asthma) associated with aberrant Tango-77 activity. The SPOIL molecules of the present invention or SPOIL modulators as identified by a screening assay described herein can be administered to individuals to treat (prophylactically or therapeutically) disorders (e.g, inflammatory or developmental disorders) associated with aberrant SPOIL and/or IL-1 activity. The NEOKINE molecules of the present invention, as well as agents, or modulators which have a stimulatory or inhibitory effect on NEOKINE activity (e.g., NEOKINE gene expression) as identified by a screening assay described herein can be administered to individuals to treat (prophylactically or therapeutically) disorders (e.g, inflammatory disorders) associated with aberrant NEOKINE activity. Agents, or modulators which have a stimulatory or inhibitory effect on T129 activity (e.g., T129 gene expression) as identified by a screening assay described herein can be administered to individuals to treat (prophylactically or therapeutically) disorders (e.g., an immunological disorder) associated with aberrant T129 activity. In conjunction with such treatment, the pharmacogenomics (i.e., the study of the relationship between an individual's genotype and that individual's response to a foreign compound or drug) of the individual may be considered. Differences in metabolism of therapeutics can lead to severe toxicity or therapeutic failure by altering the relation between dose and blood concentration of the pharmacologically active drug. Thus, the pharmacogenomics of the individual permits the selection of effective agents (e.g., drugs) for prophylactic or therapeutic treatments based on a consideration of the individual's genotype. Such pharmacogenomics can further be used to determine appropriate dosages and therapeutic regimens. Accordingly, the activity of FTHMA-070, Tango85, Tango77, SPOIL, NEOKINE, Tango129 or A259 protein, expression of FTHMA-070, Tango85, Tango77, SPOIL, NEOKINE, Tango129 or A259 nucleic acid, or mutation content of FTHMA-070, Tango85, Tango77, SPOIL, NEOKINE, Tango129 or A259 genes in an individual can be determined to thereby select appropriate agent(s) for therapeutic or prophylactic treatment of the individual.

[0968] Pharmacogenomics deals with clinically significant hereditary variations in the response to drugs due to altered drug disposition and abnormal action in affected persons. See, e.g., Linder (1997) Clin. Chem. 43(2):254-266. In general, two types of pharmacogenetic conditions can be differentiated. Genetic conditions transmitted as a single factor altering the way drugs act on the body (altered drug action) or genetic conditions transmitted as single factors altering the way the body acts on drugs (altered drug metabolism). These pharmacogenetic conditions can occur either as rare defects or as polymorphisms. For example, glucose-6-phosphate dehydrogenase deficiency (G6PD) is a common inherited enzymopathy in which the main clinical complication is haemolysis after ingestion of oxidant drugs (anti-malarials, sulfonamides, analgesics, nitrofurans) and consumption of fava beans.

[0969] One pharmacogenomics approach to identifying genes that predict drug response, known as “a genome-wide association”, relies primarily on a high-resolution map of the human genome consisting of already known gene-related markers (e.g., a “bi-allelic” gene marker map which consists of 60,000-100,000 polymorphic or variable sites on the human genome, each of which has two variants). Such a high-resolution genetic map can be compared to a map of the genome of each of a statistically significant number of patients taking part in a Phase II/III drug trial to identify markers associated with a particular observed drug response or side effect. Alternatively, such a high resolution map can be generated from a combination of some ten-million known single nucleotide polymorphisms (SNPs) in the human genome. As used herein, a “SNP” is a common alteration that occurs in a single nucleotide base in a stretch of DNA. For example, a SNP may occur once per every 1000 bases of DNA. A SNP may be involved in a disease process, however, the vast majority may not be disease-associated. Given a genetic map based on the occurrence of such SNPs, individuals can be grouped into genetic categories depending on a particular pattern of SNPs in their individual genome. In such a manner, treatment regimens can be tailored to groups of genetically similar individuals, taking into account traits that may be common among such genetically similar individuals.

[0970] Alternatively, a method termed the “candidate gene approach”, can be utilized to identify genes that predict drug response. According to this method, if a gene that encodes a drug target is known (e.g., a SPOIL or NEOKINE protein or SPOIL or NEOKINE receptor of the present invention), all common variants of that gene can be identified in the population and a particular drug response can be associated with one or more genes.

[0971] As an illustrative embodiment, the activity of drug metabolizing enzymes is a major determinant of both the intensity and duration of drug action. The discovery of genetic polymorphisms of drug metabolizing enzymes (e.g., N-acetyltransferase 2 (NAT 2) and cytochrome P450 enzymes CYP2D6 and CYP2C19) has provided an explanation as to why some patients do not obtain the expected drug effects or show exaggerated drug response and serious toxicity after taking the standard and safe dose of a drug. These polymorphisms are expressed in two phenotypes in the population, the extensive metabolizer (EM) and poor metabolizer (PM). The prevalence of PM is different among different populations. For example, the gene coding for CYP2D6 is highly polymorphic and several mutations have been identified in PM, which all lead to the absence of functional CYP2D6. Poor metabolizers of CYP2D6 and CYP2C19 quite frequently experience exaggerated drug response and side effects when they receive standard doses. If a metabolite is the active therapeutic moiety, PM show no therapeutic response, as demonstrated for the analgesic effect of codeine mediated by its CYP2D6-formed metabolite morphine. The other extreme are the so called ultra-rapid metabolizers who do not respond to standard doses. Recently, the molecular basis of ultra-rapid metabolism has been identified to be due to CYP2D6 gene amplification.

[0972] Alternatively, a method termed the “gene expression profiling”, can be utilized to identify genes that predict drug response. For example, the gene expression of an animal dosed with a drug (e.g., a SPOIL or NEOKINE molecule or SPOIL or NEOKINE modulator of the present invention) indicate whether gene pathways related to toxicity have been turned on.

[0973] Information generated from more than one of the above pharmacogenomics approaches can be used to determine appropriate dosage and treatment regimens for prophylactic or therapeutic treatment an individual. This knowledge, when applied to dosing or drug selection, can avoid adverse reactions or therapeutic failure and thus enhance therapeutic or prophylactic efficiency when treating a subject with a SPOIL or NEOKINE molecule or SPOIL or NEOKINE modulator, such as a modulator identified by one of the exemplary screening assays described herein.

[0974] Thus, the activity of FTHMA-070, Tango85, Tango77, SPOIL, NEOKINE, Tango129 or A259 protein, expression of FTHMA-070, Tango85, Tango77, SPOIL, NEOKINE, Tango129 or A259 nucleic acid, or mutation content of FTHMA-070, Tango85, Tango77, SPOIL, NEOKINE, Tango129 or A259 genes in an individual can be determined to thereby select appropriate agent(s) for therapeutic or prophylactic treatment of the individual. In addition, pharmacogenetic studies can be used to apply genotyping of polymorphic alleles encoding drug-metabolizing enzymes to the identification of an individual's drug responsiveness phenotype. This knowledge, when applied to dosing or drug selection, can avoid adverse reactions or therapeutic failure and thus enhance therapeutic or prophylactic efficiency when treating a subject with a FTHMA-070, Tango85, Tango77, SPOIL, NEOKINE, Tango129 or A259 modulator, such as a modulator identified by one of the exemplary screening assays described herein.

### FTHMA-070, Tango85, Tango77, SPOIL, NEOKINE, Tango129 or A259 Monitoring of Effects During Clinical Trials

[0975] Monitoring the influence of agents (e.g., drugs, compounds) on the expression or activity of FTHMA-070 or T85 (e.g., the ability to modulate aberrant cell proliferation and/or differentiation) can be applied not only in basic drug screening, but also in clinical trials. For example, the effectiveness of an agent determined by a screening assay as described herein to increase FTHMA-070 or T85 gene expression, protein levels, or upregulate FTHMA-070 or T85 activity, can be monitored in clinical trails of subjects exhibiting decreased FTHMA-070 or T85 gene expression, protein levels, or downregulated FTHMA-070 or T85 activity. Alternatively, the effectiveness of an agent determined by a screening assay to decrease FTHMA-070 or T85 gene expression, protein levels, or downregulated FTHMA-070 or T85 activity, can be monitored in clinical trails of subjects exhibiting increased FTHMA-070 or T85 gene expression, protein levels, or upregulated FTHMA-070 or T85 activity. In such clinical trials, the expression or activity of FTHMA-070 or T85 and, preferably, other genes that have been implicated in, for example, a cellular proliferation disorder can be used as a “read out” or markers of the immune responsiveness of a particular cell.

[0976] Monitoring the influence of agents (e.g., drugs, compounds) on the expression or activity of Tango-77 (e.g., the ability to modulate aberrant inflammation) can be applied not only in basic drug screening, but also in clinical trials. For example, the effectiveness of an agent, as determined by a screening assay as described herein, to increase Tango-77 gene expression, increase protein levels, or upregulate Tango-77 activity, can be monitored in clinical trials of subjects exhibiting decreased Tango-77 gene expression, decreased protein levels, or downregulated Tango-77 activity. Alternatively, the effectiveness of an agent, as determined by a screening assay, to decrease Tango-77 gene expression, decrease protein levels, or downregulate Tango-77 activity, can be monitored in clinical trials of subjects exhibiting increased Tango-77 gene expression, increased protein levels, or upregulated Tango-77 activity.

[0977] Monitoring the influence of SPOIL agents (e.g., modulatory agents and/or SPOIL proteins) on the expression or activity of SPOIL and/or IL-1 (e.g., modulation of signal transduction, modulation of cell development or differentiation, regulation of cellular proliferation) can be applied not only in basic drug screening, but also in clinical trials. For example, the effectiveness of an agent determined by a screening assay (as described herein) to modulate SPOIL and/or IL-1 expression or activity can be monitored in clinical trails of subjects exhibiting increased SPOIL and/or IL-1 expression or activity and/or decreased SPOIL and/or IL-1 gene expression, protein levels or activity. Alternatively, the effectiveness of an agent determined by a screening assay to increase SPOIL and/or IL-1 expression or activity and/or downregulate SPOIL and/or IL-1 gene expression, protein levels or activity, can be monitored in clinical trails of subjects exhibiting increased SPOIL and/or IL-1 expression or activity and/or decreased SPOIL and/or IL-1 gene expression, protein levels or activity.

[0978] In such clinical trials, the expression or activity of SPOIL and/or IL-1 and, preferably, other genes that have been implicated in, for example, a proinflammatory disorder, an immune disorder, or a bone metabolism disorder can be used as a “read out” or markers of the phenotype of a particular cell.

[0979] Monitoring the influence of agents (e.g., drugs, compounds) on the expression or activity of a NEOKINE protein (e.g., modulation of angiogenesis or of an inflammatory responese) an be applied not only in basic drug screening, but also in clinical trials. For example, the effectiveness of an agent determined by a screening assay as described herein to increase NEOKINE gene expression, protein levels, or upregulate NEOKINE activity, can be monitored in clinical trials of subjects exhibiting decreased NEOKINE gene expression, protein levels, or downregulated NEOKINE activity. Alternatively, the effectiveness of an agent determined by a screening assay to decrease NEOKINE gene expression, protein levels, or downregulate NEOKINE activity, can be monitored in clinical trials of subjects exhibiting increased NEOKINE gene expression, protein levels, or upregulated NEOKINE activity. In such clinical trials, the expression or activity of a NEOKINE gene, and preferably, other genes that have been implicated in, for example, an inflammatory disorder can be used as a “read out” or markers of the phenotype of a particular cell.

[0980] Monitoring the influence of agents (e.g., drugs, compounds) on the expression or activity of T129 or A259 (e.g., the ability to modulate aberrant cell proliferation and/or differentiation) can be applied not only in basic drug screening, but also in clinical trials. For example, the effectiveness of an agent determined by a screening assay as described herein to increase T129 or A259 gene expression, protein levels, or upregulate T129 or A259 activity, can be monitored in clinical trails of subjects exhibiting decreased T129 or A259 gene expression, protein levels, or downregulated T129 or A259 activity. Alternatively, the effectiveness of an agent determined by a screening assay to decrease T129 or A259 gene expression, protein levels, or downregulated T129 or A259 activity, can be monitored in clinical trails of subjects exhibiting increased T129 or A259 gene expression, protein levels, or upregulated T129 or A259 activity. In such clinical trials, the expression or activity of T129 or A259 and, preferably, other genes that have been implicated in, for example, a cellular proliferation disorder can be used as a “read out” or markers of the immune responsiveness of a particular cell.

[0981] For example, and not by way of limitation, genes, including FTHMA-070, Tango85, Tango77, SPOIL, NEOKINE, Tango129 or A259, that are modulated in cells by treatment with an agent (e.g., compound, drug or small molecule) which modulates FTHMA-070, Tango85, Tango77, SPOIL, NEOKINE, Tango129 or A259 activity (e.g., identified in a screening assay as described herein) can be identified. Thus, to study the effect of agents on cellular proliferation disorders, proinflammatory disorders, or developmental or differentiative disorders (e.g., a bone metabolism disorder) for example, in a clinical trial, cells can be isolated and RNA prepared and analyzed for the levels of expression of FTHMA-070, Tango85, Tango77, SPOIL, NEOKINE, Tango129 or A259 and other genes implicated in the disorder. The levels of gene expression (i.e., a gene expression pattern) can be quantified by Northern blot analysis or RT-PCR, as described herein, or alternatively by measuring the amount of protein produced, by one of the methods as described herein, or by measuring the levels of activity of FTHMA-070, Tango85, Tango77, SPOIL, NEOKINE, Tango129 or A259 or other genes. In this way, the gene expression pattern can serve as a marker, indicative of the physiological response of the cells to the agent. Accordingly, this response state may be determined before, and at various points during, treatment of the individual with the agent.

[0982] In a preferred embodiment, the present invention provides a method for monitoring the effectiveness of treatment of a subject with an agent (e.g., an agonist, antagonist, peptidomimetic, protein, peptide, nucleic acid, small molecule, or other drug candidate identified by the screening assays described herein) comprising the steps of (i) obtaining a pre-administration sample from a subject prior to administration of the agent; (ii) detecting the level of expression of a FTHMA-070, Tango85, Tango77, SPOIL, NEOKINE, Tango129 or A259 protein, mRNA, or genomic DNA in the preadministration sample; (iii) obtaining one or more post-administration samples from the subject; (iv) detecting the level of expression or activity of the FTHMA-070, Tango85, Tango77, SPOIL, NEOKINE, Tango129 or A259 protein, mRNA, or genomic DNA in the post-administration samples; (v) comparing the level of expression or activity of the FTHMA-070, Tango85, Tango77, SPOIL, NEOKINE, Tango129 or A259 protein, mRNA, or genomic DNA in the pre-administration sample with the FTHMA-070, Tango85, Tango77, SPOIL, NEOKINE, Tango129 or A259 protein, mRNA, or genomic DNA in the post administration sample or samples; and (vi) altering the administration of the agent to the subject accordingly. For example, increased administration of the agent may be desirable to increase the expression or activity of FTHMA-070, Tango85, Tango77, SPOIL, NEOKINE, Tango129 or A259 to higher levels than detected, i.e., to increase the effectiveness of the agent. Alternatively, decreased administration of the agent may be desirable to decrease expression or activity of FTHMA-070, Tango85, Tango77, SPOIL, NEOKINE, Tango129 or A259 to lower levels than detected, i.e., to decrease the effectiveness of the agent.

### FTHMA-070, Tango85, Tango77, SPOIL, NEOKINE, Tango129 or A259 Methods of Treatment

[0983] The present invention provides for both prophylactic and therapeutic methods of treating a subject at risk of (or susceptible to) a disorder or having a disorder associated with aberrant FTHMA-070, Tango85, SPOIL or NEOKINE expression or activity.

[0984] The present invention provides for both prophylactic and therapeutic methods of treating a subject at risk of (or susceptible to) developing or having a disorder associated with aberrant Tango-77 expression or activity. Alternatively, disorders associated with aberrant IL-1 production can be treated with Tango-77. Such disorders include acute and chronic inflammation, asthma, some classes of arthritis, autoimmune diabetes, systemic lupus erythematosus and inflammatory bowel disease.

[0985] The present invention provides for both prophylactic and therapeutic methods of treating a subject at risk of (or susceptible to) a disorder or having a disorder associated with aberrant T129 expression or activity. Such disorders include immunological disorders, e.g., disorders associated with abnormal lymphoid and/or thymic development, T-cell mediated immune response, T-cell dependent help for B cells, and abnormal humoral B cell activity, and, possibly, disorders of the skeletal muscle.

[0986] The present invention provides for both prophylactic and therapeutic methods of treating a subject at risk of (or susceptible to) a disorder or having a disorder associated with aberrant A259 expression or activity of a polypeptide of the invention. For example, disorders characterized by aberrant A259 expression or activity of the polypeptides of the invention include immunologic disorders. In addition, the A259 nucleic acids, polypeptides, and modulators thereof of the invention can be used to treat immunologic diseases and disorders, including but not limited to inflammatory disorders (e.g., atopic dermatitis). A259 polypeptides of the invention can also treat diseases associated and bone and cartilage degenerative diseases and disorders (e.g., arthritis, e.g., rheumatoid arthritis), as well as other disorders described herein.

### Prophylactic Methods

[0987] In one aspect, the invention provides a method for preventing in a subject, a disease or condition associated with an aberrant FTHMA-070, Tango85, Tango77, SPOIL, NEOKINE, Tango129 or A259 expression or activity, by administering to the subject an agent which modulates FTHMA-070, Tango85, Tango77, SPOIL, NEOKINE, Tango129 or A259 expression or at least one FTHMA-070, Tango85, Tango77, SPOIL, NEOKINE, Tango129 or A259 activity. Subjects at risk for a disease which is caused or contributed to by aberrant FTHMA-070, Tango85, Tango77, NEOKINE, Tango129 or A259 expression or activity can be identified by, for example, any or a combination of diagnostic or prognostic assays as described herein. Administration of a prophylactic agent can occur prior to the manifestation of symptoms characteristic of the FTHMA-070, Tango85, Tango77, SPOIL, NEOKINE, Tango129 or A259 aberrancy, such that a disease or disorder is prevented or, alternatively, delayed in its progression. Depending on the type of FTHMA-070, Tango85, Tango77, SPOIL, NEOKINE, Tango129 or A259 aberrancy, for example, a FTHMA-070, Tango85, Tango77, SPOIL, NEOKINE, Tango129 or A259 agonist or FTHMA-070, Tango85, Tango77, SPOIL, NEOKINE, Tango129 or A259 antagonist agent can be used for treating the subject. The appropriate agent can be determined based on screening assays described herein. For example, an antagonist of an A259 protein may be used to treat an arthropathic disorder, e.g., rheumatoid arthritis. The appropriate agent can be determined based on screening assays described herein.

### Therapeutic Methods

[0988] Another aspect of the invention pertains to methods of modulating FTHMA-070, Tango85, Tango77, Tango129 or A259 expression or activity for therapeutic purposes. The modulatory method of the invention involves contacting a cell with an agent that modulates one or more of the activities of FTHMA-070, Tango85, Tango77, Tango129 or A259 protein activity associated with the cell. An agent that modulates FTHMA-070, Tango85, Tango77, Tango129 or A259 protein activity can be an agent as described herein, such as a nucleic acid or a protein, a naturally-occurring cognate ligand of a FTHMA-070, Tango85, Tango77, Tango129 or A259 protein, a peptide, a FTHMA-070, Tango85, Tango77, Tango129 or A259 peptidomimetic, or other small molecule. In one embodiment, the agent stimulates one or more of the biological activities of FTHMA-070, Tango85, Tango77, Tango129 or A259 protein. Examples of such stimulatory agents include active FTHMA-070, Tango85, Tango77, Tango129 or A259 protein and a nucleic acid molecule encoding FTHMA-070, Tango85, Tango77, Tango129 or A259 that has been introduced into the cell. In another embodiment, the agent inhibits one or more of the biological activities of FTHMA-070, Tango85, Tango77, Tango129 or A259 protein. Examples of such inhibitory agents include antisense FTHMA-070, Tango85, Tango77, Tango129 or A259 nucleic acid molecules and anti-FTHMA-070, Tango85, Tango77, Tango129 or A259 antibodies. These modulatory methods can be performed in vitro (e.g., by culturing the cell with the agent) or, alternatively, in vivo (e.g, by administering the agent to a subject). As such, the present invention provides methods of treating an individual afflicted with a disease or disorder characterized by aberrant expression or activity of a FTHMA-070, Tango85, Tango77, Tango129 or A259 protein or nucleic acid molecule. In one embodiment, the method involves administering an agent (e.g., an agent identified by a screening assay described herein), or combination of agents that modulates (e.g., upregulates or down-regulates) FTHMA-070, Tango85, Tango77, Tango129 or A259 expression or activity. In another embodiment, the method involves administering a FTHMA-070, Tango85, Tango77, Tango129 or A259 protein or nucleic acid molecule as therapy to compensate for reduced or aberrant FTHMA-070, Tango85, Tango77, Tango129 or A259 expression or activity.

[0989] Another aspect of the invention pertains to methods of modulating SPOIL and/or IL-1 expression or activity for therapeutic purposes. The modulatory method of the invention involves contacting a cell with an agent that modulates one or more of the activities of SPOIL and/or IL-1 associated with the cell or one or more of the activities involved in inflammation, immune response, or bone turnover. An agent that modulates SPOIL and/or IL-1 activity can be an agent as described herein, such as a SPOIL modulator, a nucleic acid encoding a SPOIL protein or a SPOIL protein, a SPOIL peptide, or SPOIL peptidomimetic. In one embodiment, the agent stimulates one or more SPOIL and/or IL-1 protein activity. Examples of such stimulatory agents include SPOIL variants which have SPOIL receptor and/or IL-1 receptor agonist function or a nucleic acid molecule encoding such a SPOIL variant that has been introduced into a cell. In another embodiment, the agent inhibits one or more SPOIL and/or IL-1 activity. Examples of such inhibitory agents include SPOIL proteins and nucleic acid molecules, mutant SPOIL proteins and nucleic acid molecules, antisense SPOIL nucleic acid molecules and SPOIL antibodies. These modulatory methods can be performed in vitro (e.g., by culturing the cell with the agent) or, alternatively, in vivo (e.g, by administering the agent to a subject). As such, the present invention provides methods of treating an individual afflicted with a disease or disorder characterized by aberrant SPOIL and/or IL-1 expression or activity. In one embodiment, the method involves administering a SPOIL agent (e.g., an agent described herein), or combination of agents that modulates (e.g., upregulates or downregulates) SPOIL and/or IL-1 expression or activity. In another embodiment, the method involves administering a SPOIL protein or nucleic acid molecule as therapy to compensate for reduced SPOIL expression or activity.

[0990] Another aspect of the invention pertains to methods of modulating NEOKINE or chemokine expression or activity for therapeutic purposes. It has been determined that NEOKINE-1 is strongly expressed in the kidney. This expression of NEOKINE-1 indicates that the NEOKINES have utility in treating kidney inflammation, a major cause of renal failure in chronic and acute renal failure and transplantation. It is known in the art that expression of chemokines in the kidney is not only correlated with inflammation pathology, but also that blocking chemokine action by anti-chemokine antibodies limits or halts progression of the inflammation and resulting tissue damage. The fact that normal human kidney expresses abundant NEOKINE transcript suggests that the kidney makes significant quantities of the protein and that therefore the pro-inflammatory activity low or non-existent. This is consistent with the proposed natural antagonist function of the NEOKINE proteins. Furthermore, signal peptide cleavage prediction on NEOKINE implies that the mature protein will have only two residues before the first cysteine. In an analogous situation, an artificially truncated form of IL-8 with only one residue before the first cysteine instead of the naturally-occurring 6 residues converts the protein from an agonist to an antagonist.

[0991] Accordingly, in an exemplary embodiment, the modulatory method of the invention involves contacting a cell with a NEOKINE such that the activity of a chemokine is modulated. Alternatively, the modulatory method of the invention involves contacting a cell with a NEOKINE or agent that modulates one or more of the activities of NEOKINE protein activity associated with the cell. An agent that modulates NEOKINE protein activity can be an agent as described herein, such as a nucleic acid or a protein, a naturally-occurring target molecule of a NEOKINE protein (e.g., a carbohydrate), a NEOKINE antibody, a NEOKINE agonist or antagonist, a peptidomimetic of a NEOKINE agonist or antagonist, or other small molecule. In one embodiment, the agent stimulates one or more NEOKINE activites. Examples of such stimulatory agents include active NEOKINE protein and a nucleic acid molecule encoding NEOKINE that has been introduced into the cell. In another embodiment, the agent inhibits one or more NEOKINE activites. Examples of such inhibitory agents include antisense NEOKINE nucleic acid molecules and anti-NEOKINE antibodies. These modulatory methods can be performed in vitro (e.g., by culturing the cell with the agent) or, alternatively, in vivo (e.g, by administering the agent to a subject). As such, the present invention provides methods of treating an individual afflicted with a disease or disorder characterized by aberrant expression or activity of a NEOKINE protein or nucleic acid molecule. Alternatively, the present invention provides methods of treating an individual afflicted with a disease or disorder characterized by aberrant expression or activity of a chemokine. In one embodiment, the method involves administering an agent (e.g., an agent identified by a screening assay described herein), or combination of agents that modulates (e.g., upregulates or downregulates) NEOKINE expression or activity or the expression or activity of a chemokine. In another embodiment, the method involves administering a NEOKINE protein or nucleic acid molecule as therapy to compensate for reduced or aberrant NEOKINE expression or activity. In another embodiment, the method involves administering a NEOKINE protein or nucleic acid molecule as therapy to compensate for reduced or aberrant chemokine expression or activity.

[0992] A preferred embodiment of the present invention involves a method for treatment of a SPOIL or NEOKINE associated disease or disorder which includes the step of administering a therapeutically effective amount of a SPOIL or NEOKINE antibody to a subject. As defined herein, a therapeutically effective amount of antibody (i.e., an effective dosage) ranges from about 0.001 to 30 mg/kg body weight, preferably about 0.01 to 25 mg/kg body weight, more preferably about 0.1 to 20 mg/kg body weight, and even more preferably about 1 to 10 mg/kg, 2 to 9 mg/kg, 3 to 8 mg/kg, 4 to 7 mg/kg, or 5 to 6 mg/kg body weight. The skilled artisan will appreciate that certain factors may influence the dosage required to effectively treat a subject, including but not limited to the severity of the disease or disorder, previous treatments, the general health and/or age of the subject, and other diseases present. Moreover, treatment of a subject with a therapeutically effective amount of an antibody can include a single treatment or, preferably, can include a series of treatments. In a preferred example, a subject is treated with antibody in the range of between about 0.1 to 20 mg/kg body weight, one time per week for between about 1 to 10 weeks, preferably between 2 to 8 weeks, more preferably between about 3 to 7 weeks, and even more preferably for about 4, 5, or 6 weeks. It will also be appreciated that the effective dosage of antibody used for treatment may increase or decrease over the course of a particular treatment. Changes in dosage may result from the results of diagnostic assays as described herein.

[0993] Stimulation of FTHMA-070, Tango85, Tango77, Tango129 or A259 activity is desirable in situations in which FTHMA-070, Tango85, Tango77, Tango129 or A259 is abnormally downregulated and/or in which increased FTHMA-070, Tango85, Tango77, Tango129 or A259 activity is likely to have a beneficial effect. Conversely, inhibition of FTHMA-070, Tango85, Tango77, Tango129 or A259 activity is desirable in situations in which FTHMA-070, Tango85, Tango77, Tango129 or A259 is abnormally upregulated and/or in which decreased FTHMA-070, Tango85, Tango77, Tango129 or A259 activity is likely to have a beneficial effect.

[0994] Stimulation of expression or activity is desirable in situations in which SPOIL and/or IL-1 is abnormally downregulated and/or in which increased expression or activity is likely to have a beneficial effect. Likewise, inhibition of expression or activity is desirable in situations in which SPOIL and/or IL-1 is abnormally upregulated and/or in which decreased expression or activity is likely to have a beneficial effect. One example of such a situation is where a subject has a disorder characterized by aberrant cellular differentiation (e.g., a bone resorption disorder). Another example of such a situation is where the subject has a proinflammatory disorder (e.g., sepsis) characterized by an aberrant SPOIL and/or IL-1 response.

[0995] Stimulation of NEOKINE activity is desirable in situations in which NEOKINE is abnormally downregulated and/or in which increased NEOKINE activity is likely to have a beneficial effect. For example, stimulation of NEOKINE activity is desirable in situations in which a chemokine is upregulated and/or in which increased NEOKINE activity is likely to have a beneficial effect (e.g., a situation is where a subject has a disorder characterized by aberrant angiogenesis or inflammation, such as kidney inflammation. Likewise, inhibition of NEOKINE activity is desirable in situations in which NEOKINE is abnormally upregulated and/or in which decreased NEOKINE activity is likely to have a beneficial effect.

### Delta3 Diagnostic and Prognostic Assays

[0996] The present methods provides means for determining if a subject is at risk of developing a disorder characterized by an aberrant Delta3 activity, such as aberrant cell proliferation, degeneration, and/or differentiation resulting for example in a neurodegenerative disease or cancer. The invention also provides methods for determining whether a subject is at risk of developing a disease or disorder associated with one or more specific alleles of a Delta3 gene. In fact, specific Delta3 alleles may be associated with specific diseases or disorders. For example, at least one allele of hDelta3 is likely to be associated with the neurological disease ACCPN. Accordingly, the invention provides methods for determining whether a subject has or is at risk of developing a neurological disease, e.g., ACCPN. In another embodiment, the invention provides methods for determining whether a subject has or is at risk of developing a vascular disorder or a disorder associated with cell fate determination. In one embodiment, the invention comprises determining the identity of the Delta3 allele in a subject and comparing the molecular structure of the Delta3 gene of the subject with the molecular structure of a Delta3 gene from a subject which does not have the neurological disease. Determining the molecular structure can be, e.g., determining the identity of at least one nucleotide, determining the nucleotide composition or determining the methylation pattern of the gene.

[0997] In one embodiment, the invention provides a method for determining whether a subject has genetic lesion in a Delta3 gene or a specific allelic variant of a polymorphic region in a Delta3 gene. The specific allele can be a mutant allele. In another embodiment, the invention provides methods for determining whether a subject has an aberrant Delta3 protein, resulting from aberrant post-translational modifications of the protein, such as aberrant phosphorogulation or glycosylation. Also, within the scope of the invention are methods for determining whether a subject has an aberrant expression level of a Delta3 protein, which could be due to a genetic lesion in the Delta3 gene or due to an aberrant level or activity of a protein regulating the expression of a Delta3 gene.

[0998] In preferred embodiments, the methods can be characterized as comprising detecting, in a sample of cells from the subject, the presence or absence of a genetic lesion characterized by at least one of (i) an alteration affecting the integrity of a gene encoding a Delta-protein, or (ii) the mis-expression of a Delta3 gene. To illustrate, such genetic lesions can be detected by ascertaining the existence of at least one of (i) a deletion of one or more nucleotides from a Delta3 gene, (ii) an addition of one or more nucleotides to a Delta3 gene, (iii) a substitution of one or more nucleotides of a Delta3 gene, (iv) a gross chromosomal rearrangement of a Delta3 gene, (v) a gross alteration in the level of a messenger RNA transcript of a Delta3 gene, (vii) aberrant modification of a Delta3 gene, such as of the methylation pattern of the genomic DNA, (vii) the presence of a non-wild type splicing pattern of a messenger RNA transcript of a Delta3 gene, (viii) a non-wild type level of a Delta-protein, (ix) allelic loss of a Delta3 gene, and (x) inappropriate post-translational modification of a Delta-protein. As set out below, the present invention provides a large number of assay techniques for detecting lesions in a Delta3 gene, and importantly, provides the ability to discern between different molecular causes underlying Delta-dependent aberrant cell proliferation and/or differentiation.

[0999] For determining whether a subject has or is at risk of developing a disease or condition associated with a specific allele of a Delta3 gene, preliminary experiments can be performed to determine the identity of the allele associated with a disease. For example, for determining the identity of the hDelta3 allele associated with ACCPN, one can perform mutation detection studies of the Delta3 gene in populations having a high risk of developing ACCPN. For example, one can perform mutation detection analysis of the genomic DNA from subjects in the French Canadian population in the Charlevoix and Saguenay-Lac St Jean regions of the province of Quebec (Casaubon et al. (1996) Am. J. Hum. Genet. 58:28). Such an analysis will reveal the identity of the Delta3 allele or alleles associated with ACCPN. Comparison of the Delta3 allele of a subject with this allele or alleles associated with ACCPN will indicate whether a subject has a Delta3 allele associated with ACCPN and thus whether the subject has or is likely to develop ACCPN. Similarly, mutation detection analysis can also be carried out to determine the identity of Delta3 alles associated with other diseases or conditions.

[1000] In an exemplary embodiment, there is provided a nucleic acid composition comprising a (purified) oligonucleotide probe including a region of nucleotide sequence which is capable of hybridizing to a sense or antisense sequence of a Delta3 gene, such as represented by any of SEQ ID NOs: 1, 3, 24, 26, 27, 29, 31, 33, 35, 37, 39, 41, 43 or 45, alleles thereof, naturally-occurring mutants thereof, or 5′ or 3′ flanking sequences or intronic sequences naturally associated with the subject Delta3 genes or naturally-occurring mutants thereof. The nucleic acid of a cell is rendered accessible for hybridization, the probe is exposed to nucleic acid of the sample, and the hybridization of the probe to the sample nucleic acid is detected. Such techniques can be used to detect lesions at either the genomic or mRNA level, including deletions, substitutions, etc., as well as to determine mRNA transcript levels.

[1001] As set out above, one aspect of the present invention relates to diagnostic assays for determining, in the context of cells isolated from a patient, if mutations have arisen in one or more Delta3 genes of the sample cells. The present method provides a method for determining if a subject is at risk for a disorder characterized by aberrant Delta3 activity, e.g., cell proliferation and/or differentiation. In preferred embodiments, the method can be generally characterized as comprising detecting, in a sample of cells from the subject, the presence or absence of a genetic lesion characterized by an alteration affecting the integrity of a gene encoding a Delta protein. To illustrate, such genetic lesions can be detected by ascertaining the existence of at least one of (i) a deletion of one or more nucleotides from a Delta-gene, (ii) an addition of one or more nucleotides to a Delta-gene, (iii) a substitution of one or more nucleotides of a Delta-gene, and (iv) the presence of a non-wild type splicing pattern of a messenger RNA transcript of a Delta-gene. As set out below, the present invention provides a large number of assay techniques for detecting lesions in Delta3 genes, and importantly, provides the ability to discern between different molecular causes underlying Delta-dependent aberrant cell proliferation and/or differentiation.

[1002] In certain embodiments, detection of the lesion in a Delta gene or the identity of an allelic variant of a polymorphic region of a Delta gene comprises utilizing the probe/primer in a polymerase chain reaction (PCR) (see, e.g., U.S. Pat. Nos. 4,683,195 and 4,683,202), such as anchor PCR or RACE PCR, or, alternatively, in a ligation chain reaction (LCR) (see, e.g., Landegran et al. (1988) Science 241:1077-1080; and Nakazawa et al. (1994) PNAS 91:360-364), the latter of which can be particularly useful for detecting point mutations in the Delta-gene (see Abravaya et al. (1995) Nuc Acid Res 23:675-682). In a merely illustrative embodiment, the method includes the steps of (i) collecting a sample of cells from a patient, (ii) isolating nucleic acid (e.g., genomic, mRNA or both) from the cells of the sample, (iii) contacting the nucleic acid sample with one or more primers which specifically hybridize to a Delta gene under conditions such that hybridization and amplification of the Delta-gene (if present) occurs, and (iv) detecting the presence or absence of an amplification product, or detecting the size of the amplification product and comparing the length to a control sample. It is anticipated that PCR and/or LCR may be desirable to use as a preliminary amplification step in conjunction with any of the techniques used for detecting mutations described herein.

[1003] Alternative amplification methods include: self sustained sequence replication (Guatelli, J. C. et al., 1990, Proc. Natl. Acad. Sci. USA 87:1874-1878), transcriptional amplification system (Kwoh, D. Y. et al., 1989, Proc. Natl. Acad. Sci. USA 86:1173-1177), Q-Beta Replicase (Lizardi, P. M. et al., 1988, Bio/Technology 6:1197), or any other nucleic acid amplification method, followed by the detection of the amplified molecules using techniques well known to those of skill in the art. These detection schemes are especially useful for the detection of nucleic acid molecules if such molecules are present in very low numbers.

[1004] In a preferred embodiment of the subject assay, mutations in a Delta3 gene or specific alleles of a Delta3 gene from a sample cell are identified by alterations in restriction enzyme cleavage patterns. For example, sample and control DNA is isolated, amplified (optionally), digested with one or more restriction endonucleases, and fragment length sizes are determined by gel electrophoresis. Moreover, the use of sequence specific ribozymes (see, for example, U.S. Pat. No. 5,498,531, incorporated herein by reference in its entirety) can be used to score for the presence of specific mutations by development or loss of a ribozyme cleavage site.

[1005] In yet another embodiment, any of a variety of sequencing reactions known in the art can be used to directly sequence the Delta3 gene and detect mutations or allelic variants of polymorphic regions by comparing the sequence of the sample Delta3 with the corresponding wild-type (control) sequence. Exemplary sequencing reactions include those based on techniques developed by Maxim and Gilbert (Proc. Natl. Acad Sci USA (1977) 74:560) or Sanger (Sanger et al (1977) Proc. Nat. Acad. Sci. 74:5463). It is also contemplated that any of a variety of automated sequencing procedures may be utilized when performing the subject assays (Biotechniques (1995) 19:448), including by sequencing by mass spectrometry (see, for example PCT publication WO 94/16101; Cohen et al. (1996) Adv Chromatogr 36:127-162; and Griffin et al. (1993) Appl Biochem Biotechnol 38:147-159). It will be evident to one skilled in the art that, for certain embodiments, the occurrence of only one, two or three of the nucleic acid bases need be determined in the sequencing reaction. For instance, A-tract or the like, e.g., where only one nucleic acid is detected, can be carried out.

[1006] In a further embodiment, protection from cleavage agents (such as a nuclease, hydroxylamine or osmium tetroxide and with piperidine) can be used to detect mismatched bases in RNA/RNA or RNA/DNA heteroduplexes (Myers, et al. (1985) Science 230:1242). In general, the art technique of “mismatch cleavage” starts by providing heteroduplexes of formed by hybridizing (labeled) RNA or DNA containing the wild-type Delta3 sequence with potentially mutant RNA or DNA obtained from a tissue sample. The double-stranded duplexes are treated with an agent which cleaves single-stranded regions of the duplex such as which will exist due to basepair mismatches between the control and sample strands. For instance, RNA/DNA duplexes can be treated with RNase and DNA/DNA hybrids treated with S1 nuclease to enzymatically digesting the mismatched regions. In other embodiments, either DNA/DNA or RNA/DNA duplexes can be treated with hydroxylamine or osmium tetroxide and with piperidine in order to digest mismatched regions. After digestion of the mismatched regions, the resulting material is then separated by size on denaturing polyacrylamide gels to determine the site of mutation. See, for example, Cotton et al (1988) Proc. Natl. Acad Sci USA 85:4397; Saleeba et al (1992) Methods Enzymod. 217:286-295. In a preferred embodiment, the control DNA or RNA can be labeled for detection.

[1007] In still another embodiment, the mismatch cleavage reaction employs one or more proteins that recognize mismatched base pairs in double-stranded DNA (so called “DNA mismatch repair” enzymes) in defined systems for detecting and mapping point mutations in Delta3 cDNAs obtained from samples of cells. For example, the mutY enzyme of E. coli cleaves A at G/A mismatches and the thymidine DNA glycosylase from HeLa cells cleaves T at G/T mismatches (Hsu et al. (1994) Carcinogenesis 15:1657-1662). According to an exemplary embodiment, a probe based on a Delta3 sequence, e.g., a wild-type Delta3 sequence, is hybridized to a cDNA or other DNA product from a test cell(s). The duplex is treated with a DNA mismatch repair enzyme, and the cleavage products, if any, can be detected from electrophoresis protocols or the like. See, for example, U.S. Pat. No. 5,459,039, incorporated herein by reference in its entirety.

[1008] In other embodiments, alterations in electrophoretic mobility will be used to identify mutations in Delta3 genes or for determining the identity of the Delta3 allele. For example, single strand conformation polymorphism (SSCP) may be used to detect differences in electrophoretic mobility between mutant and wild type nucleic acids (Orita et al. (1989) Proc Natl. Acad. Sci. USA 86:2766, see also Cotton (1993) Mutat Res 285:125-144; and Hayashi (1992) Genet Anal Tech Appl 9:73-79). Single-stranded DNA fragments of sample and control Delta3 nucleic acids will be denatured and allowed to renature. The secondary structure of single-stranded nucleic acids varies according to sequence, the resulting alteration in electrophoretic mobility enables the detection of even a single base change. The DNA fragments may be labelled or detected with labelled probes. The sensitivity of the assay may be enhanced by using RNA (rather than DNA), in which the secondary structure is more sensitive to a change in sequence. In a preferred embodiment, the subject method utilizes heteroduplex analysis to separate double stranded heteroduplex molecules on the basis of changes in electrophoretic mobility (Keen et al. (1991) Trends Genet. 7:5).

[1009] In yet another embodiment the movement of mutant or wild-type fragments in polyacrylamide gels containing a gradient of denaturant is assayed using denaturing gradient gel electrophoresis (DGGE) (Myers et al (1985) Nature 313:495). When DGGE is used as the method of analysis, DNA will be modified to insure that it does not completely denature, for example by adding a GC clamp of approximately 40 bp of high-melting GC-rich DNA by PCR. In a further embodiment, a temperature gradient is used in place of a denaturing agent gradient to identify differences in the mobility of control and sample DNA (Rosenbaum and Reissner (1987) Biophys Chem 265:12753).

[1010] Examples of other techniques for detecting point mutations include, but are not limited to, selective oligonucleotide hybridization, selective amplification, or selective primer extension. For example, oligonucleotide primers may be prepared in which the known mutation is placed centrally and then hybridized to target DNA under conditions which permit hybridization only if a perfect match is found (Saiki et al. (1986) Nature 324:163); Saiki et al (1989) Proc. Natl. Acad. Sci. USA 86:6230). Such allele specific oligonucleotide hybridization techniques may be used to test one mutation per reaction when oligonucleotides are hybridized to PCR amplified target DNA or a number of different mutations when the oligonucleotides are attached to the hybridizing membrane and hybridized with labeled target DNA.

[1011] Alternatively, allele specific amplification technology which depends on selective PCR amplification may be used in conjunction with the instant invention. Oligonucleotides used as primers for specific amplification may carry the mutation of interest in the center of the molecule (so that amplification depends on differential hybridization) (Gibbs et al (1989) Nucleic Acids Res. 17:2437-2448) or at the extreme 3′ end of one primer where, under appropriate conditions, mismatch can prevent, or reduce polymerase extension (Prossner (1993) Tibtech 11:238. In addition it may be desirable to introduce a novel restriction site in the region of the mutation to create cleavage-based detection (Gasparini et al. (1992) Mol. Cell. Probes 6:1). It is anticipated that in certain embodiments amplification may also be performed using Taq ligase for amplification (Barany (1991) Proc. Natl. Acad. Sci. USA 88:189). In such cases, ligation will occur only if there is a perfect match at the 3′ end of the 5′ sequence making it possible to detect the presence of a known mutation at a specific site by looking for the presence or absence of amplification.

[1012] Another embodiment of the invention provides for a nucleic acid composition comprising a (purified) oligonucleotide probe including a region of nucleotide sequence which is capable of hybridizing to a sense or antisense sequence of a Delta-gene, or naturally-occurring mutants thereof, or 5′ or 3′ flanking sequences or intronic sequences naturally associated with the subject Delta-genes or naturally-occurring mutants thereof. The nucleic acid of a cell is rendered accessible for hybridization, the probe is exposed to nucleic acid of the sample, and the hybridization of the probe to the sample nucleic acid is detected. Such techniques can be used to detect lesions at either the genomic or mRNA level, including deletions, substitutions, etc., as well as to determine mRNA transcript levels. Such oligonucleotide probes can be used for both predictive and therapeutic evaluation of allelic mutations which might be manifest in, for example, a neurodegenerative, neoplastic or hyperplastic disorders (e.g., aberrant cell growth).

[1013] The methods described herein may be performed, for example, by utilizing pre-packaged diagnostic kits comprising at least one probe nucleic acid or antibody reagent described herein, which may be conveniently used, e.g., in clinical settings to diagnose patients exhibiting symptoms or family history of a disease or illness involving a Delta3 gene.

[1014] Any cell type or tissue, preferably neural or endothelial cells, in which the Delta3 is expressed may be utilized in the diagnostics described below. For example, a subject's bodily fluid (e.g., blood) can be obtained by known techniques (e.g., venipuncture). Alternatively, nucleic acid tests can be performed on dry samples (e.g., hair or skin). Fetal nucleic acid samples can be obtained from maternal blood as described in International Patent Application NO: WO91/07660 to Bianchi. Alternatively, amniocytes or chorionic villi may be obtained for performing prenatal testing, e.g., of ACCPN, which is a disease which is usually fatal in the third decade of life.

[1015] Diagnostic procedures may also be performed in situ directly upon tissue sections (fixed and/or frozen) of patient tissue obtained from biopsies or resections, such that no nucleic acid purification is necessary. Nucleic acid reagents may be used as probes and/or primers for such in situ procedures (see, for example, Nuovo, G.J., 1992, PCR in situ hybridization: protocols and applications, Raven Press, NY).

[1016] In addition to methods which focus primarily on the detection of one nucleic acid sequence, profiles may also be assessed in such detection schemes. Fingerprint profiles may be generated, for example, by utilizing a differential display procedure, Northern analysis and/or RT-PCR.

[1017] Antibodies directed against wild type or mutant Delta3 proteins, which are discussed, above, may also be used in disease diagnostics and prognostics. Such diagnostic methods, may be used to detect abnormalities in the level of Delta3 protein expression, or abnormalities in the structure and/or tissue, cellular, or subcellular location of Delta3 proteins. Structural differences may include, for example, differences in the size, electronegativity, or antigenicity of the mutant Delta3 protein relative to the normal Delta3 protein. Protein from the tissue or cell type to be analyzed may easily be detected or isolated using techniques which are well known to one of skill in the art, including but not limited to western blot analysis. For a detailed explanation of methods for carrying out western blot analysis, see Sambrook et al, 1989, supra, at Chapter 18. The protein detection and isolation methods employed herein may also be such as those described in Harlow and Lane, for example, (Harlow, E. and Lane, D., 1988, “Antibodies: A Laboratory Manual”, Cold Spring Harbor Laboratory Press, Cold Spring Harbor, N.Y.).

[1018] This can be accomplished, for example, by immunofluorescence techniques employing a fluorescently labeled antibody (see below) coupled with light microscopic, flow cytometric, or fluorimetric detection. The antibodies (or fragments thereof) useful in the present invention may, additionally, be employed histologically, as in immunofluorescence or immunoelectron microscopy, for in situ detection of Delta3 proteins. In situ detection may be accomplished by removing a histological specimen from a patient, and applying thereto a labeled antibody of the present invention. The antibody (or fragment) is preferably applied by overlaying the labeled antibody (or fragment) onto a biological sample. Through the use of such a procedure, it is possible to determine not only the presence of the Delta3 protein, but also its distribution in the examined tissue. Using the present invention, one of ordinary skill will readily perceive that any of a wide variety of histological methods (such as staining procedures) can be modified in order to achieve such in situ detection.

[1019] Often a solid phase support or carrier is used as a support capable of binding an antigen or an antibody. Well-known supports or carriers include glass, polystyrene, polypropylene, polyethylene, dextran, nylon, amylases, natural and modified celluloses, polyacrylamides, gabbros, and magnetite. The nature of the carrier can be either soluble to some extent or insoluble for the purposes of the present invention. The support material may have virtually any possible structural configuration so long as the coupled molecule is capable of binding to an antigen or antibody. Thus, the support configuration may be spherical, as in a bead, or cylindrical, as in the inside surface of a test tube, or the external surface of a rod. Alternatively, the surface may be flat such as a sheet, test strip, etc. Preferred supports include polystyrene beads. Those skilled in the art will know many other suitable carriers for binding antibody or antigen, or will be able to ascertain the same by use of routine experimentation.

[1020] One means for labeling an anti-Delta3 protein specific antibody is via linkage to an enzyme and use in an enzyme immunoassay (EIA) (Voller, “The Enzyme Linked Immunosorbent Assay (ELISA)”, Diagnostic Horizons 2:1-7, 1978, Microbiological Associates Quarterly Publication, Walkersville, Md.; Voller, et al., J. Clin. Pathol. 31:507-520 (1978); Butler, Meth. Enzymol. 73:482-523 (1981); Maggio, (ed.) Enzyme Immunoassay, CRC Press, Boca Raton, Fla., 1980; Ishikawa, et al., (eds.) Enzyme Immunoassay, Kgaku Shoin, Tokyo, 1981). The enzyme which is bound to the antibody will react with an appropriate substrate, preferably a chromogenic substrate, in such a manner as to produce a chemical moiety which can be detected, for example, by spectrophotometric, fluorimetric or by visual means. Enzymes which can be used to detectably label the antibody include, but are not limited to, malate dehydrogenase, staphylococcal nuclease, delta-5-steroid isomerase, yeast alcohol dehydrogenase, alpha-glycerophosphate, dehydrogenase, triose phosphate isomerase, horseradish peroxidase, alkaline phosphatase, asparaginase, glucose oxidase, beta-galactosidase, ribonuclease, urease, catalase, glucose-6-phosphate dehydrogenase, glucoamylase and acetylcholinesterase. The detection can be accomplished by colorimetric methods which employ a chromogenic substrate for the enzyme. Detection may also be accomplished by visual comparison of the extent of enzymatic reaction of a substrate in comparison with similarly prepared standards.

[1021] Detection may also be accomplished using any of a variety of other immunoassays. For example, by radioactively labeling the antibodies or antibody fragments, it is possible to detect fingerprint gene wild type or mutant peptides through the use of a radioimmunoassay (RIA) (see, for example, Weintraub, B., Principles of Radioimmunoassays, Seventh Training Course on Radioligand Assay Techniques, The Endocrine Society, March, 1986). The radioactive isotope can be detected by such means as the use of a gamma counter or a scintillation counter or by autoradiography.

[1022] It is also possible to label the antibody with a fluorescent compound. When the fluorescently labeled antibody is exposed to light of the proper wave length, its presence can then be detected due to fluorescence. Among the most commonly used fluorescent labeling compounds are fluorescein isothiocyanate, rhodamine, phycoerythrin, phycocyanin, allophycocyanin, o-phthaldehyde and fluorescamine.

[1023] The antibody can also be detectably labeled using fluorescence emitting metals such as 152Eu, or others of the lanthanide series. These metals can be attached to the antibody using such metal chelating groups as diethylenetriaminepentacetic acid (DTPA) or ethylenediaminetetraacetic acid (EDTA).

[1024] The antibody also can be detectably labeled by coupling it to a chemiluminescent compound. The presence of the chemiluminescent-tagged antibody is then determined by detecting the presence of luminescence that arises during the course of a chemical reaction. Examples of particularly useful chemiluminescent labeling compounds are luminol, isoluminol, theromatic acridinium ester, imidazole, acridinium salt and oxalate ester.

[1025] Likewise, a bioluminescent compound may be used to label the antibody of the present invention. Bioluminescence is a type of chemiluminescence found in biological systems in, which a catalytic protein increases the efficiency of the chemiluminescent reaction. The presence of a bioluminescent protein is determined by detecting the presence of luminescence. Important bioluminescent compounds for purposes of labeling are luciferin, luciferase and aequorin.

[1026] Moreover, it will be understood that any of the above methods for detecting alterations in a Delta3 gene or gene product can be used to monitor the course of treatment or therapy.

### Delta3 Drug Screening Assays

[1027] The invention provides for compounds, e.g., therapeutic compounds, for treating diseases or conditions caused by, or contributed to by an abnormal Delta3 activity. The compounds that can be used for this purpose can be any type of compound, including a protein, a peptide, peptidomimetic, small molecule, and nucleic acid. A nucleic acid can be, e.g., a gene, an antisense nucleic acid, a ribozyme, or a triplex molecule. A compound of the invention can be an agonist or an antagonist. A compound can act on a Delta3 gene, e.g., to modulate its expression. A compound can also act on a Delta3 protein, e.g., to modulate signal transduction from the receptor. Accordingly, a compound of the invention can be a compound which binds to Delta3 and induces signal transduction from the receptor, such that, e.g., a Delta3 activity is induced. Alternatively, a compound of the invention can be a compound which inhibits interaction of a Delta3 protein with a toporythmic protein, e.g., Notch. In one embodiment, a compound of the invention which interacts with a Delta protein, which is either an agonist or an antagonist, is a toporythmic protein or other protein interacting with Delta3. In an even more preferred embodiment, the compound is a soluble toporythmic protein or other protein interacting with Delta3. For example, a soluble antagonistic toporythmic protein can be a protein which competes with the wild type toporythmic proteins for binding to Delta3. A soluble agonistic toporythmic protein can be a protein which binds to a Delta3 protein in essentially the same manner as a wild-type toporythmic protein, such as to induce at least one Delta3 activity, e.g., signal transduction from the Delta3 protein. Accordingly, a soluble toporythmic protein can be stimulatory form of a toporythmic protein or an inhibitory form of a toporythmic, depending on whether the particular toporythmic protein stimulates or inhibits a Delta3 activity.

[1028] Similarly, a soluble Delta3 protein, e.g., Delta3-Ig, can be used to modulate an activity of a toporythmic protein, e.g., Notch. For example, a soluble Delta3 protein can be a stimulatory form of a Delta3 protein, i.e., a Delta3 protein which is capable of stimulating an activity of a toporythmic protein. In one embodiment, such a protein acts in essentially the same manner as wild-type Delta3. In another embodiment, a soluble Delta3 protein is an inhibitory form of a Delta3 protein, i.e., a Delta3 protein which is capable of inhibiting an activity of a toporythmic protein. For example, such a Delta3 protein could inhibit the interaction of wild-type Delta3 with the toporythmic protein. In a preferred embodiment, an inhibitory form of a Delta3 protein inhibits the interaction of several proteins which normally interact with a toporythmic protein, by, e.g., binding to a site of the toporythmic protein that is also a binding site to various other proteins, e.g., other Delta proteins. Accordingly, a Delta3 therapeutic can generally affect the interaction of various toporythmic proteins with each other. Similarly, based at least in part on the sequence and structural similarities between Delta proteins, a Delta therapeutic, other than a Delta3 therapeutic, can also be used for modulating the interaction between a Delta3 protein and a Delta3 interacting binding molecule.

[1029] The compounds of the invention can be identified using various assays depending on the type of compound and activity of the compound that is desired. Set forth below are at least some assays that can be used for identifying Delta3 therapeutics. It is within the skill of the art to design additional assays for identifying Delta therapeutics, e.g., Delta3 therapeutics.

[1030] By making available purified and recombinant Delta3 polypeptides, the present invention facilitates the development of assays which can be used to screen for drugs, including Delta3 variants, which are either agonists or antagonists of the normal cellular function of the subject Delta3 polypeptides, or of their role in the pathogenesis of cellular differentiation and/or proliferation and disorders related thereto. In one embodiment, the assay evaluates the ability of a compound to modulate binding between a Delta3 polypeptide and a molecule, be it protein or DNA, that interacts either upstream or downstream of the Delta/Notch signaling pathway. A variety of assay formats will suffice and, in light of the present inventions, will be comprehended by a skilled artisan.

### Delta3 Cell-Free Assays

[1031] Cell free assays can be used to identify compounds which interact with a Delta3 protein. Such assays are available for testing compounds which are proteins, e.g., toporythmic proteins or variants thereof, as well as for testing compounds which are peptidomimetics, small molecules or nucleic acids. The specific assay used for testing these compounds may vary with the type of compound.

[1032] In one embodiment, a compound that interacts with a Delta3 protein is identified by screening, e.g., a library of compounds, for binding to a recombinant or purified Delta3 protein or at least a portion thereof. Such assays can involve labeling one or the two components and measuring the extent of their interaction, by, e.g., determining the level of the one or two labels. In these assays, it may be preferable to attach the Delta3 protein to a solid phase surface. Methods for achieving this are further described infra. In one embodiment, the library of compounds is a library of small molecules. In another embodiment, the library of compounds is a library of Delta3 variants, which can be produced according to methods described infra.

[1033] Identification of a compound which inhibits an interaction between a Delta3 protein and a toporythmic protein can also be performed by screening compounds using aggregation assays, as described, e.g., in Fehon et al. (1990) Cell 61:523-534.

[1034] In another embodiment, the invention provides methods for identifying compounds which inhibit the interaction of a Delta3 protein with a molecule, e.g., a toporythmic protein or a protein interacting with the cytoplasmic domain of a Delta3 protein. Such methods, which are preferably used in high throughput assays can be performed as follows.

[1035] In many drug screening programs which test libraries of compounds and natural extracts, high throughput assays are desirable in order to maximize the number of compounds surveyed in a given period of time. Assays which are performed in cell-free systems, such as may be derived with purified or semi-purified proteins, are often preferred as “primary” screens in that they can be generated to permit rapid development and relatively easy detection of an alteration in a molecular target which is mediated by a test compound. Moreover, the effects of cellular toxicity and/or bioavailability of the test compound can be generally ignored in the in vitro system, the assay instead being focused primarily on the effect of the drug on the molecular target as may be manifest in an alteration of binding affinity with upstream or downstream elements. Accordingly, in an exemplary screening assay of the present invention, the compound of interest is contacted with proteins which may function upstream (including both activators and repressors of its activity) or to proteins or nucleic acids which may function downstream of the Delta3 polypeptide, whether they are positively or negatively regulated by it. For example, a protein functioning upstream of a Delta3 polypeptide can be a compound interacting with the extracellular portion of the Delta3 molecule. A protein functioning downstream of a Delta3 polypeptide can be a protein interacting with the cytoplasmic domain of Delta3 and, e.g., transducing a signal to the nucleus. To the mixture of the compound and the upstream or downstream element is then added a composition containing a Delta3 polypeptide. Detection and quantification of complexes of Delta3 with it's upstream or downstream elements provide a means for determining a compound's efficacy at inhibiting (or potentiating) complex formation between Delta3 and the Delta-binding elements. The efficacy of the compound can be assessed by generating dose response curves from data obtained using various concentrations of the test compound. Moreover, a control assay can also be performed to provide a baseline for comparison. In the control assay, isolated and purified Delta3 polypeptide is added to a composition containing the Delta-binding element, and the formation of a complex is quantitated in the absence of the test compound.

[1036] Complex formation between the Delta3 polypeptide and a Delta3 binding element may be detected by a variety of techniques. Modulation of the formation of complexes can be quantitated using, for example, detectably labeled proteins such as radiolabeled, fluorescently labeled, or enzymatically labeled Delta3 polypeptides, by immunoassay, or by chromatographic detection.

[1037] Typically, it will be desirable to immobilize either Delta3 or its binding protein to facilitate separation of complexes from uncomplexed forms of one or both of the proteins, as well as to accommodate automation of the assay. Binding of Delta3 to an upstream or downstream element, in the presence and absence of a candidate agent, can be accomplished in any vessel suitable for containing the reactants. Examples include microtitre plates, test tubes, and micro-centrifuge tubes. In one embodiment, a fusion protein can be provided which adds a domain that allows the protein to be bound to a matrix. For example, glutathione-S-transferase/Delta3 (GST/Delta) fusion proteins can be adsorbed onto glutathione sepharose beads (Sigma Chemical, St. Louis, Mo.) or glutathione derivatized microtitre plates, which are then combined with the cell lysates, e.g., an ³⁵S-labeled, and the test compound, and the mixture incubated under conditions conducive to complex formation, e.g., at physiological conditions for salt and pH, though slightly more stringent conditions may be desired. Following incubation, the beads are washed to remove any unbound label, and the matrix immobilized and radiolabel determined directly (e.g., beads placed in scintilant), or in the supernatant after the complexes are subsequently dissociated. Alternatively, the complexes can be dissociated from the matrix, separated by SDS-PAGE, and the level of Delta-binding protein found in the bead fraction quantitated from the gel using standard electrophoretic techniques such as described in the appended examples.

[1038] Other techniques for immobilizing proteins on matrices are also available for use in the subject assay. For instance, either Delta3 or its cognate binding protein can be immobilized utilizing conjugation of biotin and streptavidin. For instance, biotinylated Delta3 molecules can be prepared from biotin-NHS(N-hydroxy-succinimide) using techniques well known in the art (e.g., biotinylation kit, Pierce Chemicals, Rockford, Ill.), and immobilized in the wells of streptavidin-coated 96 well plates (Pierce Chemical). Alternatively, antibodies reactive with Delta3 but which do not interfere with binding of upstream or downstream elements can be derivatized to the wells of the plate, and Delta3 trapped in the wells by antibody conjugation. As above, preparations of a Delta-binding protein and a test compound are incubated in the Delta-presenting wells of the plate, and the amount of complex trapped in the well can be quantitated. Exemplary methods for detecting such complexes, in addition to those described above for the GST-immobilized complexes, include immunodetection of complexes using antibodies reactive with the Delta3 binding element, or which are reactive with Delta3 protein and compete with the binding element; as well as enzyme-linked assays which rely on detecting an enzymatic activity associated with the binding element, either intrinsic or extrinsic activity. In the instance of the latter, the enzyme can be chemically conjugated or provided as a fusion protein with the Delta-BP. To illustrate, the Delta-BP can be chemically cross-linked or genetically fused with horseradish peroxidase, and the amount of polypeptide trapped in the complex can be assessed with a chromogenic substrate of the enzyme, e.g., 3,3′-diamino-benzadine terahydrochloride or 4-chloro-1-naphthol. Likewise, a fusion protein comprising the polypeptide and glutathione-S-transferase can be provided, and complex formation quantitated by detecting the GST activity using 1-chloro-2,4-dinitrobenzene (Habig et al (1974) J Biol Chem 249:7130).

[1039] For processes which rely on immunodetection for quantitating one of the proteins trapped in the complex, antibodies against the protein, such as anti-Delta3 antibodies, can be used. Alternatively, the protein to be detected in the complex can be “epitope tagged” in the form of a fusion protein which includes, in addition to the Delta3 sequence, a second polypeptide for which antibodies are readily available (e.g., from commercial sources). For instance, the GST fusion proteins described above can also be used for quantification of binding using antibodies against the GST moiety. Other useful epitope tags include myc-epitopes (e.g., see Ellison et al. (1991) J Biol Chem 266:21150-21157) which includes a 10-residue sequence from c-myc, as well as the pFLAG system (International Biotechnologies, Inc.) or the pEZZ-protein A system (Pharmacia, N.J.).

### Delta3 Cell Based Assays

[1040] In addition to cell-free assays, such as described above, the readily available source of Delta3 proteins provided by the present invention also facilitates the generation of cell-based assays for identifying small molecule agonists/antagonists and the like. For example, cells which are sensitive to bFGF/VEGF or matrigel can be caused to overexpress a recombinant Delta3 protein in the presence and absence of a test agent of interest, with the assay scoring for modulation in Delta3 responses by the target cell mediated by the test agent. As with the cell-free assays, agents which produce a statistically significant change in Delta-dependent responses (either inhibition or potentiation) can be identified. In an illustrative embodiment, the expression or activity of a Delta3 is modulated in embryos or cells and the effects of compounds of interest on the readout of interest (such as tissue differentiation, proliferation, tumorigenesis) are measured. For example, the expression of genes which are up- or down-regulated in response to a Delta-dependent signal cascade can be assayed. In preferred embodiments, the regulatory regions of such genes, e.g., the 5′ flanking promoter and enhancer regions, are operably linked to a detectable marker (such as luciferase) which encodes a gene product that can be readily detected.

[1041] Exemplary cell lines may include endothelial cells such as MVEC's and bovine aortic endothelial cells (BAEC's); as well as generic mammalian cell lines such as HeLa cells and COS cells, e.g., COS-7 (ATCC®# CRL-1651). Further, the transgenic animals discussed herein may be used to generate cell lines, containing one or more cell types involved in cardiovascular disease, that can be used as cell culture models for this disorder. While primary cultures derived from the transgenic animals of the invention may be utilized, the generation of continuous cell lines is preferred. For examples of techniques which may be used to derive a continuous cell line from the transgenic animals, see Small et al., 1985, Mol. Cell. Biol. 5:642-648.

[1042] In one embodiment, a test compound that modifies a Delta3 activity can be identified by incubating a cell having a Delta3 protein with the test compound and measuring signal transduction from the Delta3 protein. Comparison of the signal transduction in the cells incubated with or without the test compound will reveal whether the test compound is a Delta3 therapeutic. Similarly, a test compound that modifies a Delta3 activity can be identified by incubating a cell having a Delta3 ligand with the test compound, e.g., a Delta3 derived compound, and measuring signal transduction from the Delta3 ligand. Comparison of the signal transduction in the cells incubated with or without the test compound will reveal whether the test compound is a Delta3 therapeutic.

[1043] In the event that the Delta3 proteins themselves, or in complexes with other proteins, are capable of binding DNA and/or modifying transcription of a gene, a transcriptional based assay could be used, for example, in which a Delta3 responsive regulatory sequence is operably linked to a detectable marker gene, e.g., a luciferase gene. Similarly, Delta3 therapeutics could also be identified by using an assay in which expression of genes that are modulated upon binding of a Delta3 protein to a Delta3 ligand on a cell is monitored. Genes that are responsive to interaction with a Delta3 protein or Delta3 ligand can be identified according to methods known in the art, e.g., differential hybridization or differential display.

[1044] In another embodiment, a silicon-based device, called a microphysiometer, can be used to detect and measure the response of cells having a Delta3 protein to test compounds to identify Delta3 therapeutics. This instrument measures the rate at which cells acidify their environment, which is indicative of cellular growth and/or differentiation (McConnel et al. (1992) Science 257:1906).

[1045] Monitoring the influence of compounds on cells may be applied not only in basic drug screening, but also in clinical trials. In such clinical trials, the expression of a panel of genes may be used as a “read out” of a particular drug's therapeutic effect.

[1046] In yet another aspect of the invention, the subject Delta3 polypeptides can be used to generate a “two hybrid” assay (see, for example, U.S. Pat. No. 5,283,317; Zervos et al. (1993) Cell 72:223-232; Madura et al. (1993) J Biol Chem 268:12046-12054; Bartel et al. (1993) Biotechniques 14:920-924; Iwabuchi et al. (1993) Oncogene 8:1693-1696; and Brent WO94/10300), for isolating coding sequences for other cellular proteins which bind to or interact with Delta3 (“Delta-binding proteins” or “Delta-bp”), such as Notch, and the like.

[1047] Briefly, the two hybrid assay relies on reconstituting in vivo a functional transcriptional activator protein from two separate fusion proteins. In particular, the method makes use of chimeric genes which express hybrid proteins. To illustrate, a first hybrid gene comprises the coding sequence for a DNA-binding domain of a transcriptional activator fused in frame to the coding sequence for a Delta3 polypeptide. The second hybrid protein encodes a transcriptional activation domain fused in frame to a sample gene from a cDNA library. If the bait and sample hybrid proteins are able to interact, e.g., form a Delta-dependent complex, they bring into close proximity the two domains of the transcriptional activator. This proximity is sufficient to cause transcription of a reporter gene which is operably linked to a transcriptional regulatory site responsive to the transcriptional activator, and expression of the reporter gene can be detected and used to score for the interaction of the Delta3 and sample proteins. This system can be used to identify compounds which modify, e.g., inhibit the interaction between a Delta3 protein and another protein, by adding 1 test compound to a cell containing the above-described plasmids. The effect of the test compound on the reporter gene expression and then measured to determine the effect of the test compound on the interaction.

[1048] In another embodiment, the invention provides arrays for identifying compounds that can induce apoptosis of cells through a Delta3 protein. Apoptotic arrays are known in the act and are described, e.g., in Grimm et al. (1996) Proc. Natl. Acad. Sci. USA 93:10923.

### Delta3 Detection Assays

[1049] Portions or fragments of the cDNA sequences identified herein (and the corresponding complete gene sequences) can be used in numerous ways as polynucleotide reagents. For example, these sequences can be used to: (i) map their respective genes on a chromosome and, thus, locate gene regions associated with genetic disease; (ii) identify an individual from a minute biological sample (tissue typing); and (iii) aid in forensic identification of a biological sample. These applications are described in the subsections below.

### Delta3 Chromosome Mapping

[1050] Once the sequence (or a portion of the sequence) of a gene has been isolated, this sequence can be used to map the location of the gene on a chromosome. Accordingly, nucleic acid molecules described herein or fragments thereof, can be used to map the location of the corresponding genes on a chromosome. The mapping of the sequences to chromosomes is an important first step in correlating these sequences with genes associated with disease.

[1051] Briefly, genes can be mapped to chromosomes by preparing PCR primers (preferably 15-25 bp in length) from the sequence of a gene of the invention. Computer analysis of the sequence of a gene of the invention can be used to rapidly select primers that do not span more than one exon in the genomic DNA, thus complicating the amplification process. These primers can then be used for PCR screening of somatic cell hybrids containing individual human chromosomes. Only those hybrids containing the human gene corresponding to the gene sequences will yield an amplified fragment. For a review of this technique, see D'Eustachio et al. ((1983) Science 220:919-924).

[1052] PCR mapping of somatic cell hybrids is a rapid procedure for assigning a particular sequence to a particular chromosome. Three or more sequences can be assigned per day using a single thermal cycler. Using the nucleic acid sequences of the invention to design oligonucleotide primers, sublocalization can be achieved with panels of fragments from specific chromosomes. Other mapping strategies which can similarly be used to map a gene to its chromosome include in situ hybridization (described in Fan et al. (1990) Proc. Natl. Acad. Sci. USA 87:6223-27), pre-screening with labeled flow-sorted chromosomes (CITE), and pre-selection by hybridization to chromosome specific cDNA libraries. Fluorescence in situ hybridization (FISH) of a DNA sequence to a metaphase chromosomal spread can further be used to provide a precise chromosomal location in one step. For a review of this technique, see Verna et al., (Human Chromosomes: A Manual of Basic Techniques (Pergamon Press, New York, 1988)).

[1053] Reagents for chromosome mapping can be used individually to mark a single chromosome or a single site on that chromosome, or panels of reagents can be used for marking multiple sites and/or multiple chromosomes. Reagents corresponding to noncoding regions of the genes actually are preferred for mapping purposes. Coding sequences are more likely to be conserved within gene families, thus increasing the chance of cross hybridizations during chromosomal mapping.

[1054] Once a sequence has been mapped to a precise chromosomal location, the physical position of the sequence on the chromosome can be correlated with genetic map data. (Such data are found, for example, in V. McKusick, Mendelian Inheritance in Man, available on-line through Johns Hopkins University Welch Medical Library). The relationship between genes and disease, mapped to the same chromosomal region, can then be identified through linkage analysis (co-inheritance of physically adjacent genes), described in, e.g., Egeland et al. (1987) Nature 325:783-787.

[1055] Moreover, differences in the DNA sequences between individuals affected and unaffected with a disease associated with a gene of the invention can be determined. If a mutation is observed in some or all of the affected individuals but not in any unaffected individuals, then the mutation is likely to be the causative agent of the particular disease. Comparison of affected and unaffected individuals generally involves first looking for structural alterations in the chromosomes such as deletions or translocations that are visible from chromosome spreads or detectable using PCR based on that DNA sequence. Ultimately, complete sequencing of genes from several individuals can be performed to confirm the presence of a mutation and to distinguish mutations from polymorphisms.

[1056] Furthermore, the nucleic acid sequences disclosed herein can be used to perform searches against “mapping databases”, e.g., BLAST-type search, such that the chromosome position of the gene is identified by sequence homology or identity with known sequence fragments which have been mapped to chromosomes.

[1057] A polypeptide and fragments and sequences thereof and antibodies specific thereto can be used to map the location of the gene encoding the polypeptide on a chromosome. This mapping can be carried out by specifically detecting the presence of the polypeptide in members of a panel of somatic cell hybrids between cells of a first species of animal from which the protein originates and cells from a second species of animal and then determining which somatic cell hybrid(s) expresses the polypeptide and noting the chromosome(s) from the first species of animal that it contains. For examples of this technique, see Pajunen et al. (1988) Cytogenet. Cell Genet. 47:37-41 and Van Keuren et al. (1986) Hum. Genet. 74:34-40. Alternatively, the presence of the polypeptide in the somatic cell hybrids can be determined by assaying an activity or property of the polypeptide, for example, enzymatic activity, as described in Bordelon-Riser et al. (1979) Somatic Cell Genetics 5:597-613 and Owerbach et al. (1978) Proc. Natl. Acad. Sci. USA 75:5640-5644.

### Delta3 Tissue Typing

[1058] The nucleic acid sequences of the present invention can also be used to identify individuals from minute biological samples. The United States military, for example, is considering the use of restriction fragment length polymorphism (RFLP) for identification of its personnel. In this technique, an individual's genomic DNA is digested with one or more restriction enzymes, and probed on a Southern blot to yield unique bands for identification. This method does not suffer from the current limitations of “Dog Tags” which can be lost, switched, or stolen, making positive identification difficult. The sequences of the present invention are useful as additional DNA markers for RFLP (described in U.S. Pat. No. 5,272,057).

[1059] Furthermore, the sequences of the present invention can be used to provide an alternative technique which determines the actual base-by-base DNA sequence of selected portions of an individual's genome. Thus, the nucleic acid sequences described herein can be used to prepare two PCR primers from the 5′ and 3′ ends of the sequences. These primers can then be used to amplify an individual's DNA and subsequently sequence it.

[1060] Panels of corresponding DNA sequences from individuals, prepared in this manner, can provide unique individual identifications, as each individual will have a unique set of such DNA sequences due to allelic differences. The sequences of the present invention can be used to obtain such identification sequences from individuals and from tissue. The nucleic acid sequences of the invention uniquely represent portions of the human genome. Allelic variation occurs to some degree in the coding regions of these sequences, and to a greater degree in the noncoding regions. It is estimated that allelic variation between individual humans occurs with a frequency of about once per each 500 bases. Each of the sequences described herein can, to some degree, be used as a standard against which DNA from an individual can be compared for identification purposes. Because greater numbers of polymorphisms occur in the noncoding regions, fewer sequences are necessary to differentiate individuals. The noncoding sequences of SEQ ID NO: 1 and 24, can comfortably provide positive individual identification with a panel of perhaps 10 to 1,000 primers which each yield a noncoding amplified sequence of 100 bases. If predicted coding sequences, such as those in SEQ ID NO: 3 and 25 are used, a more appropriate number of primers for positive individual identification would be 500-2,000.

[1061] If a panel of reagents from the nucleic acid sequences described herein is used to generate a unique identification database for an individual, those same reagents can later be used to identify tissue from that individual. Using the unique identification database, positive identification of the individual, living or dead, can be made from extremely small tissue samples.

### Delta3 Use of Partial Gene Sequences in Forensic Biology

[1062] DNA-based identification techniques can also be used in forensic biology. Forensic biology is a scientific field employing genetic typing of biological evidence found at a crime scene as a means for positively identifying, for example, a perpetrator of a crime. To make such an identification, PCR technology can be used to amplify DNA sequences taken from very small biological samples such as tissues, e.g., hair or skin, or body fluids, e.g., blood, saliva, or semen found at a crime scene. The amplified sequence can then be compared to a standard, thereby allowing identification of the origin of the biological sample.

[1063] The sequences of the present invention can be used to provide polynucleotide reagents, e.g., PCR primers, targeted to specific loci in the human genome, which can enhance the reliability of DNA-based forensic identifications by, for example, providing another “identification marker” (i.e., another DNA sequence that is unique to a particular individual). As mentioned above, actual base sequence information can be used for identification as an accurate alternative to patterns formed by restriction enzyme generated fragments. Sequences targeted to noncoding regions are particularly appropriate for this use as greater numbers of polymorphisms occur in the noncoding regions, making it easier to differentiate individuals using this technique. Examples of polynucleotide reagents include the nucleic acid sequences of the invention or portions thereof, e.g., fragments derived from noncoding regions having a length of at least 20 or 30 bases.

[1064] The nucleic acid sequences described herein can further be used to provide polynucleotide reagents, e.g., labeled or labelable probes which can be used in, for example, an in situ hybridization technique, to identify a specific tissue, e.g., brain tissue. This can be very useful in cases where a forensic pathologist is presented with a tissue of unknown origin. Panels of such probes can be used to identify tissue by species and/or by organ type.

### Delta3 Predictive Medicine

[1065] The present invention also pertains to the field of predictive medicine in which diagnostic assays, prognostic assays, pharmacogenomics, and monitoring clinical trails are used for prognostic (predictive) purposes to thereby treat an individual prophylactically. Accordingly, one aspect of the present invention relates to diagnostic assays for determining expression of a polypeptide or nucleic acid of the invention and/or activity of a polypeptide of the invention, in the context of a biological sample (e.g., blood, serum, cells, tissue) to thereby determine whether an individual is afflicted with a disease or disorder, or is at risk of developing a disorder, associated with aberrant expression or activity of a polypeptide of the invention. The invention also provides for prognostic (or predictive) assays for determining whether an individual is at risk of developing a disorder associated with aberrant expression or activity of a polypeptide of the invention. For example, mutations in a gene of the invention can be assayed in a biological sample. Such assays can be used for prognostic or predictive purpose to thereby prophylactically treat an individual prior to the onset of a disorder characterized by or associated with aberrant expression or activity of a polypeptide of the invention.

[1066] Another aspect of the invention provides methods for expression of a nucleic acid or polypeptide of the invention or activity of a polypeptide of the invention in an individual to thereby select appropriate therapeutic or prophylactic agents for that individual (referred to herein as “pharmacogenomics”). Pharmacogenomics allows for the selection of agents (e.g., drugs) for therapeutic or prophylactic treatment of an individual based on the genotype of the individual (e.g., the genotype of the individual examined to determine the ability of the individual to respond to a particular agent).

[1067] Yet another aspect of the invention pertains to monitoring the influence of agents (e.g., drugs or other compounds) on the expression or activity of a polypeptide of the invention in clinical trials. These and other agents are described in further detail in the following sections.

### Delta3 Prognostic Assays

[1068] The methods described herein can furthermore be utilized as diagnostic or prognostic assays to identify subjects having or at risk of developing a disease or disorder associated with aberrant expression or activity of a polypeptide of the invention. For example, the assays described herein, such as the preceding diagnostic assays or the following assays, can be utilized to identify a subject having or at risk of developing a disorder associated with aberrant expression or activity of a polypeptide of the invention. Alternatively, the prognostic assays can be utilized to identify a subject having or at risk for developing such a disease or disorder. Thus, the present invention provides a method in which a test sample is obtained from a subject and a polypeptide or nucleic acid (e.g., mRNA, genomic DNA) of the invention is detected, wherein the presence of the polypeptide or nucleic acid is diagnostic for a subject having or at risk of developing a disease or disorder associated with aberrant expression or activity of the polypeptide. As used herein, a “test sample” refers to a biological sample obtained from a subject of interest. For example, a test sample can be a biological fluid (e.g., serum), cell sample, or tissue.

[1069] Furthermore, the prognostic assays described herein can be used to determine whether a subject can be administered an agent (e.g., an agonist, antagonist, peptidomimetic, protein, peptide, nucleic acid, small molecule, or other drug candidate) to treat a disease or disorder associated with aberrant expression or activity of a polypeptide of the invention. For example, such methods can be used to determine whether a subject can be effectively treated with a specific agent or class of agents (e.g., agents of a type which decrease activity of the polypeptide). Thus, the present invention provides methods for determining whether a subject can be effectively treated with an agent for a disorder associated with aberrant expression or activity of a polypeptide of the invention in which a test sample is obtained and the polypeptide or nucleic acid encoding the polypeptide is detected (e.g., wherein the presence of the polypeptide or nucleic acid is diagnostic for a subject that can be administered the agent to treat a disorder associated with aberrant expression or activity of the polypeptide).

[1070] The methods of the invention can also be used to detect genetic lesions or mutations in a gene of the invention, thereby determining if a subject with the lesioned gene is at risk for a disorder characterized aberrant expression or activity of a polypeptide of the invention. In preferred embodiments, the methods include detecting, in a sample of cells from the subject, the presence or absence of a genetic lesion or mutation characterized by at least one of an alteration affecting the integrity of a gene encoding the polypeptide of the invention, or the mis-expression of the gene encoding the polypeptide of the invention. For example, such genetic lesions or mutations can be detected by ascertaining the existence of at least one of: 1) a deletion of one or more nucleotides from the gene; 2) an addition of one or more nucleotides to the gene; 3) a substitution of one or more nucleotides of the gene; 4) a chromosomal rearrangement of the gene; 5) an alteration in the level of a messenger RNA transcript of the gene; 6) an aberrant modification of the gene, such as of the methylation pattern of the genomic DNA; 7) the presence of a non-wild type splicing pattern of a messenger RNA transcript of the gene; 8) a non-wild type level of a the protein encoded by the gene; 9) an allelic loss of the gene; and 10) an inappropriate post-translational modification of the protein encoded by the gene. As described herein, there are a large number of assay techniques known in the art which can be used for detecting lesions in a gene.

[1071] In certain embodiments, detection of the lesion involves the use of a probe/primer in a polymerase chain reaction (PCR) (see, e.g., U.S. Pat. Nos. 4,683,195 and 4,683,202), such as anchor PCR or RACE PCR, or, alternatively, in a ligation chain reaction (LCR) (see, e.g., Landegran et al. (1988) Science 241:1077-1080; and Nakazawa et al. (1994) Proc. Natl. Acad. Sci. USA 91:360-364), the latter of which can be particularly useful for detecting point mutations in a gene (see, e.g., Abravaya et al. (1995) Nucleic Acids Res. 23:675-682). This method can include the steps of collecting a sample of cells from a patient, isolating nucleic acid (e.g., genomic, mRNA or both) from the cells of the sample, contacting the nucleic acid sample with one or more primers which specifically hybridize to the selected gene under conditions such that hybridization and amplification of the gene (if present) occurs, and detecting the presence or absence of an amplification product, or detecting the size of the amplification product and comparing the length to a control sample. It is anticipated that PCR and/or LCR may be desirable to use as a preliminary amplification step in conjunction with any of the techniques used for detecting mutations described herein.

[1072] Alternative amplification methods include: self sustained sequence replication (Guatelli et al. (1990) Proc. Natl. Acad. Sci. USA 87:1874-1878), transcriptional amplification system (Kwoh, et al. (1989) Proc. Natl. Acad. Sci. USA 86:1173-1177), Q-Beta Replicase (Lizardi et al. (1988) Bio/Technology 6:1197), or any other nucleic acid amplification method, followed by the detection of the amplified molecules using techniques well known to those of skill in the art. These detection schemes are especially useful for the detection of nucleic acid molecules if such molecules are present in very low numbers.

[1073] In an alternative embodiment, mutations in a selected gene from a sample cell can be identified by alterations in restriction enzyme cleavage patterns. For example, sample and control DNA is isolated, amplified (optionally), digested with one or more restriction endonucleases, and fragment length sizes are determined by gel electrophoresis and compared. Differences in fragment length sizes between sample and control DNA indicates mutations in the sample DNA. Moreover, the use of sequence specific ribozymes (see, e.g., U.S. Pat. No. 5,498,531) can be used to score for the presence of specific mutations by development or loss of a ribozyme cleavage site.

[1074] In other embodiments, genetic mutations can be identified by hybridizing a sample and control nucleic acids, e.g., DNA or RNA, to high density arrays containing hundreds or thousands of oligonucleotides probes (Cronin et al. (1996) Human Mutation 7:244-255; Kozal et al. (1996) Nature Medicine 2:753-759). For example, genetic mutations can be identified in two-dimensional arrays containing light-generated DNA probes as described in Cronin et al. (1996) Human Mutation 7:244-255. Briefly, a first hybridization array of probes can be used to scan through long stretches of DNA in a sample and control to identify base changes between the sequences by making linear arrays of sequential overlapping probes. This step allows the identification of point mutations. This step is followed by a second hybridization array that allows the characterization of specific mutations by using smaller, specialized probe arrays complementary to all variants or mutations detected. Each mutation array is composed of parallel probe sets, one complementary to the wild-type gene and the other complementary to the mutant gene.

[1075] In yet another embodiment, any of a variety of sequencing reactions known in the art can be used to directly sequence the selected gene and detect mutations by comparing the sequence of the sample nucleic acids with the corresponding wild-type (control) sequence. Examples of sequencing reactions include those based on techniques developed by Maxim and Gilbert ((1977) Proc. Natl. Acad. Sci. USA 74:560) or Sanger ((1977) Proc. Natl. Acad. Sci. USA 74:5463). It is also contemplated that any of a variety of automated sequencing procedures can be utilized when performing the diagnostic assays ((1995) Bio/Techniques 19:448), including sequencing by mass spectrometry (see, e.g., PCT Publication NO: WO 94/16101; Cohen et al. (1996) Adv. Chromatogr. 36:127-162; and Griffin et al. (1993) Appl. Biochem. Biotechnol. 38:147-159).

[1076] Other methods for detecting mutations in a selected gene include methods in which protection from cleavage agents is used to detect mismatched bases in RNA/RNA or RNA/DNA heteroduplexes (Myers et al. (1985) Science 230:1242). In general, the technique of mismatch cleavage entails providing heteroduplexes formed by hybridizing (labeled) RNA or DNA containing the wild-type sequence with potentially mutant RNA or DNA obtained from a tissue sample. The double-stranded duplexes are treated with an agent which cleaves single-stranded regions of the duplex such as which will exist due to basepair mismatches between the control and sample strands. RNA/DNA duplexes can be treated with RNase to digest mismatched regions, and DNA/DNA hybrids can be treated with S1 nuclease to digest mismatched regions.

[1077] In other embodiments, either DNA/DNA or RNA/DNA duplexes can be treated with hydroxylamine or osmium tetroxide and with piperidine in order to digest mismatched regions. After digestion of the mismatched regions, the resulting material is then separated by size on denaturing polyacrylamide gels to determine the site of mutation. See, e.g., Cotton et al. (1988) Proc. Natl. Acad. Sci. USA 85:4397; Saleeba et al. (1992) Methods Enzymol. 217:286-295. In a preferred embodiment, the control DNA or RNA can be labeled for detection.

[1078] In still another embodiment, the mismatch cleavage reaction employs one or more proteins that recognize mismatched base pairs in double-stranded DNA (so called “DNA mismatch repair enzymes”) in defined systems for detecting and mapping point mutations in cDNAs obtained from samples of cells. For example, the mutY enzyme of E. coli cleaves A at G/A mismatches and the thymidine DNA glycosylase from HeLa cells cleaves T at G/T mismatches (Hsu et al. (1994) Carcinogenesis 15:1657-1662). According to an exemplary embodiment, a probe based on a selected sequence, e.g., a wild-type sequence, is hybridized to a cDNA or other DNA product from a test cell(s). The duplex is treated with a DNA mismatch repair enzyme, and the cleavage products, if any, can be detected from electrophoresis protocols or the like. See, e.g., U.S. Pat. No. 5,459,039.

[1079] In other embodiments, alterations in electrophoretic mobility will be used to identify mutations in genes. For example, single strand conformation polymorphism (SSCP) may be used to detect differences in electrophoretic mobility between mutant and wild type nucleic acids (Orita et al. (1989) Proc. Natl. Acad. Sci. USA 86:2766; see also Cotton (1993) Mutat. Res. 285:125-144; Hayashi (1992) Genet. Anal. Tech. Appl. 9:73-79). Single-stranded DNA fragments of sample and control nucleic acids will be denatured and allowed to renature. The secondary structure of single-stranded nucleic acids varies according to sequence, and the resulting alteration in electrophoretic mobility enables the detection of even a single base change. The DNA fragments may be labeled or detected with labeled probes. The sensitivity of the assay may be enhanced by using RNA (rather than DNA), in which the secondary structure is more sensitive to a change in sequence. In a preferred embodiment, the subject method utilizes heteroduplex analysis to separate double stranded heteroduplex molecules on the basis of changes in electrophoretic mobility (Keen et al. (1991) Trends Genet. 7:5).

[1080] In yet another embodiment, the movement of mutant or wild-type fragments in polyacrylamide gels containing a gradient of denaturant is assayed using denaturing gradient get electrophoresis (DGGE) (Myers et al. (1985) Nature 313:495). When DGGE is used as the method of analysis, DNA will be modified to insure that it does not completely denature, for example by adding a GC clamp of approximately 40 bp of high-melting GC-rich DNA by PCR. In a further embodiment, a temperature gradient is used in place of a denaturing gradient to identify differences in the mobility of control and sample DNA (Rosenbaum and Reissner (1987) Biophys. Chem. 265:12753).

[1081] Examples of other techniques for detecting point mutations include, but are not limited to, selective oligonucleotide hybridization, selective amplification, or selective primer extension. For example, oligonucleotide primers may be prepared in which the known mutation is placed centrally and then hybridized to target DNA under conditions which permit hybridization only if a perfect match is found (Saiki et al. (1986) Nature 324:163); Saiki et al. (1989) Proc. Natl. Acad. Sci. USA 86:6230). Such allele specific oligonucleotides are hybridized to PCR amplified target DNA or a number of different mutations when the oligonucleotides are attached to the hybridizing membrane and hybridized with labeled target DNA.

[1082] Alternatively, allele specific amplification technology which depends on selective PCR amplification may be used in conjunction with the instant invention. Oligonucleotides used as primers for specific amplification may carry the mutation of interest in the center of the molecule (so that amplification depends on differential hybridization) (Gibbs et al. (1989) Nucleic Acids Res. 17:2437-2448) or at the extreme 3′ end of one primer where, under appropriate conditions, mismatch can prevent or reduce polymerase extension (Prossner (1993) Tibtech 11:238). In addition, it may be desirable to introduce a novel restriction site in the region of the mutation to create cleavage-based detection (Gasparini et al. (1992) Mol. Cell. Probes 6:1). It is anticipated that in certain embodiments amplification may also be performed using Taq ligase for amplification (Barany (1991) Proc. Natl. Acad. Sci. USA 88:189). In such cases, ligation will occur only if there is a perfect match at the 3′ end of the 5′ sequence making it possible to detect the presence of a known mutation at a specific site by looking for the presence or absence of amplification.

[1083] The methods described herein may be performed, for example, by utilizing pre-packaged diagnostic kits comprising at least one probe nucleic acid or antibody reagent described herein, which may be conveniently used, e.g., in clinical settings to diagnose patients exhibiting symptoms or family history of a disease or illness involving a gene encoding a polypeptide of the invention. Furthermore, any cell type or tissue, preferably peripheral blood leukocytes, in which the polypeptide of the invention is expressed may be utilized in the prognostic assays described herein.

### Delta3 Pharmacogenomics

[1084] Agents, or modulators which have a stimulatory or inhibitory effect on activity or expression of a polypeptide of the invention as identified by a screening assay described herein can be administered to individuals to treat (prophylactically or therapeutically) disorders associated with aberrant activity of the polypeptide. In conjunction with such treatment, the pharmacogenomics (i.e., the study of the relationship between an individual's genotype and that individual's response to a foreign compound or drug) of the individual may be considered. Differences in metabolism of therapeutics can lead to severe toxicity or therapeutic failure by altering the relation between dose and blood concentration of the pharmacologically active drug. Thus, the pharmacogenomics of the individual permits the selection of effective agents (e.g., drugs) for prophylactic or therapeutic treatments based on a consideration of the individual's genotype. Such pharmacogenomics can further be used to determine appropriate dosages and therapeutic regimens. Accordingly, the activity of a polypeptide of the invention, expression of a nucleic acid of the invention, or mutation content of a gene of the invention in an individual can be determined to thereby select appropriate agent(s) for therapeutic or prophylactic treatment of the individual.

[1085] Pharmacogenomics deals with clinically significant hereditary variations in the response to drugs due to altered drug disposition and abnormal action in affected persons. See, e.g., Linder (1997) Clin. Chem. 43(2):254-266. In general, two types of pharmacogenetic conditions can be differentiated. Genetic conditions transmitted as a single factor altering the way drugs act on the body are referred to as “altered drug action.” Genetic conditions transmitted as single factors altering the way the body acts on drugs are referred to as “altered drug metabolism”. These pharmacogenetic conditions can occur either as rare defects or as polymorphisms. For example, glucose-6-phosphate dehydrogenase deficiency (G6PD) is a common inherited enzymopathy in which the main clinical complication is haemolysis after ingestion of oxidant drugs (anti-malarials, sulfonamides, analgesics, nitrofurans) and consumption of fava beans.

[1086] As an illustrative embodiment, the activity of drug metabolizing enzymes is a major determinant of both the intensity and duration of drug action. The discovery of genetic polymorphisms of drug metabolizing enzymes (e.g., N-acetyltransferase 2 (NAT 2) and cytochrome P450 enzymes CYP2D6 and CYP2C19) has provided an explanation as to why some patients do not obtain the expected drug effects or show exaggerated drug response and serious toxicity after taking the standard and safe dose of a drug. These polymorphisms are expressed in two phenotypes in the population, the extensive metabolizer (EM) and poor metabolizer (PM). The prevalence of PM is different among different populations. For example, the gene coding for CYP2D6 is highly polymorphic and several mutations have been identified in PM, which all lead to the absence of functional CYP2D6. Poor metabolizers of CYP2D6 and CYP2C19 quite frequently experience exaggerated drug response and side effects when they receive standard doses. If a metabolite is the active therapeutic moiety, a PM will show no therapeutic response, as demonstrated for the analgesic effect of codeine mediated by its CYP2D6-formed metabolite morphine. The other extreme are the so called ultra-rapid metabolizers who do not respond to standard doses. Recently, the molecular basis of ultra-rapid metabolism has been identified to be due to CYP2D6 gene amplification.

[1087] Thus, the activity of a polypeptide of the invention, expression of a nucleic acid encoding the polypeptide, or mutation content of a gene encoding the polypeptide in an individual can be determined to thereby select appropriate agent(s) for therapeutic or prophylactic treatment of the individual. In addition, pharmacogenetic studies can be used to apply genotyping of polymorphic alleles encoding drug-metabolizing enzymes to the identification of an individual's drug responsiveness phenotype. This knowledge, when applied to dosing or drug selection, can avoid adverse reactions or therapeutic failure and thus enhance therapeutic or prophylactic efficiency when treating a subject with a modulator of activity or expression of the polypeptide, such as a modulator identified by one of the exemplary screening assays described herein.

### Delta3 Monitoring of Effects During Clinical Trials

[1088] Monitoring the influence of agents (e.g., drugs, compounds) on the expression or activity of a polypeptide of the invention (e.g., the ability to modulate aberrant cell proliferation chemotaxis, and/or differentiation) can be applied not only in basic drug screening, but also in clinical trials. For example, the effectiveness of an agent, as determined by a screening assay as described herein, to increase gene expression, protein levels or protein activity, can be monitored in clinical trials of subjects exhibiting decreased gene expression, protein levels, or protein activity. Alternatively, the effectiveness of an agent, as determined by a screening assay, to decrease gene expression, protein levels or protein activity, can be monitored in clinical trials of subjects exhibiting increased gene expression, protein levels, or protein activity. In such clinical trials, expression or activity of a polypeptide of the invention and preferably, that of other polypeptide that have been implicated in for example, a cellular proliferation disorder, can be used as a marker of the immune responsiveness of a particular cell.

[1089] For example, and not by way of limitation, genes, including those of the invention, that are modulated in cells by treatment with an agent (e.g., compound, drug or small molecule) which modulates activity or expression of a polypeptide of the invention (e.g., as identified in a screening assay described herein) can be identified. Thus, to study the effect of agents on cellular proliferation disorders, for example, in a clinical trial, cells can be isolated and RNA prepared and analyzed for the levels of expression of a gene of the invention and other genes implicated in the disorder. The levels of gene expression (i.e., a gene expression pattern) can be quantified by Northern blot analysis or RT-PCR, as described herein, or alternatively by measuring the amount of protein produced, by one of the methods as described herein, or by measuring the levels of activity of a gene of the invention or other genes. In this way, the gene expression pattern can serve as a marker, indicative of the physiological response of the cells to the agent. Accordingly, this response state may be determined before, and at various points during, treatment of the individual with the agent.

[1090] In a preferred embodiment, the present invention provides a method for monitoring the effectiveness of treatment of a subject with an agent (e.g., an agonist, antagonist, peptidomimetic, protein, peptide, nucleic acid, small molecule, or other drug candidate identified by the screening assays described herein) comprising the steps of (i) obtaining a pre-administration sample from a subject prior to administration of the agent; (ii) detecting the level of the polypeptide or nucleic acid of the invention in the preadministration sample; (iii) obtaining one or more post-administration samples from the subject; (iv) detecting the level the of the polypeptide or nucleic acid of the invention in the post-administration samples; (v) comparing the level of the polypeptide or nucleic acid of the invention in the pre-administration sample with the level of the polypeptide or nucleic acid of the invention in the post-administration sample or samples; and (vi) altering the administration of the agent to the subject accordingly. For example, increased administration of the agent may be desirable to increase the expression or activity of the polypeptide to higher levels than detected, i.e., to increase the effectiveness of the agent. Alternatively, decreased administration of the agent may be desirable to decrease expression or activity of the polypeptide to lower levels than detected, i.e., to decrease the effectiveness of the agent.

### Delta3 Transgenic Animals

[1091] These systems may be used in a variety of applications. For example, the cell- and animal-based model systems may be used to further characterize Delta3 genes and proteins. In addition, such assays may be utilized as part of screening strategies designed to identify compounds which are capable of ameliorating disease symptoms. Thus, the animal- and cell-based models may be used to identify drugs, pharmaceuticals, therapies and interventions which may be effective in treating disease.

### Delta3 Animal-Based Systems

[1092] One aspect of the present invention concerns transgenic animals which are comprised of cells (of that animal) which contain a transgene of the present invention and which preferably (though optionally) express an exogenous Delta3 protein in one or more cells in the animal. A Delta3 transgene can encode the wild-type form of the protein, or can encode homologs thereof, including both alleles of Delta3 genes, agonists and antagonists, as well as antisense constructs. In preferred embodiments, the expression of the transgene is restricted to specific subsets of cells, tissues or developmental stages utilizing, for example, cis-acting sequences that control expression in the desired pattern. In the present invention, such mosaic expression of a Delta3 protein can be essential for many forms of lineage analysis and can additionally provide a means to assess the effects of, for example, lack of Delta3 expression which might grossly alter development in small patches of tissue within an otherwise normal embryo. In a preferred embodiment, the invention provides transgenic mice having an allele of hDelta3 gene which is associated with ACCPN and the mouse can be used, e.g., to determine the effect of this specific hDelta3 allele. Toward this and, tissue-specific regulatory sequences and conditional regulatory sequences can be used to control expression of the transgene in certain spatial patterns. Moreover, temporal patterns of expression can be provided by, for example, conditional recombination systems or prokaryotic transcriptional regulatory sequences.

[1093] Genetic techniques which allow for the expression of transgenes can be regulated via site-specific genetic manipulation in vivo are known to those skilled in the art. For instance, genetic systems are available which allow for the regulated expression of a recombinase that catalyzes the genetic recombination a target sequence. As used herein, the phrase “target sequence” refers to a nucleotide sequence that is genetically recombined by a recombinase. The target sequence is flanked by recombinase recognition sequences and is generally either excised or inverted in cells expressing recombinase activity. Recombinase catalyzed recombination events can be designed such that recombination of the target sequence results in either the activation or repression of expression of one of the subject Delta3 proteins. For example, excision of a target sequence which interferes with the expression of a recombinant Delta3 gene, such as one which encodes an antagonistic homolog or an antisense transcript, can be designed to activate expression of that gene. This interference with expression of the protein can result from a variety of mechanisms, such as spatial separation of the Delta3 gene from the promoter element or an internal stop codon. Moreover, the transgene can be made wherein the coding sequence of the gene is flanked by recombinase recognition sequences and is initially transfected into cells in a 3′ to 5′ orientation with respect to the promoter element. In such an instance, inversion of the target sequence will reorient the subject gene by placing the 5′ end of the coding sequence in an orientation with respect to the promoter element which allow for promoter driven transcriptional activation.

[1094] The transgenic animals of the present invention all include within a plurality of their cells a transgene of the present invention, which transgene alters the phenotype of the “host cell” with respect to regulation of cell growth, death and/or differentiation. Since it is possible to produce transgenic organisms of the invention utilizing one or more of the transgene constructs described herein, a general description will be given of the production of transgenic organisms by referring generally to exogenous genetic material. This general description can be adapted by those skilled in the art in order to incorporate specific transgene sequences into organisms utilizing the methods and materials described below.

[1095] In an illustrative embodiment, either the cre/loxP recombinase system of bacteriophage P1 (Lakso et al. (1992) PNAS 89:6232-6236; Orban et al. (1992) PNAS 89:6861-6865) or the FLP recombinase system of Saccharomyces cerevisiae (O'Gorman et al. (1991) Science 251:1351-1355; PCT publication WO 92/15694) can be used to generate in vivo site-specific genetic recombination systems. Cre recombinase catalyzes the site-specific recombination of an intervening target sequence located between loxP sequences. loxP sequences are 34 base pair nucleotide repeat sequences to which the Cre recombinase binds and are required for Cre recombinase mediated genetic recombination. The orientation of loxP sequences determines whether the intervening target sequence is excised or inverted when Cre recombinase is present (Abremski et al. (1984) J. Biol. Chem. 259:1509-1514); catalyzing the excision of the target sequence when the loxP sequences are oriented as direct repeats and catalyzes inversion of the target sequence when loxP sequences are oriented as inverted repeats.

[1096] Accordingly, genetic recombination of the target sequence is dependent on expression of the Cre recombinase. Expression of the recombinase can be regulated by promoter elements which are subject to regulatory control, e.g., tissue-specific, developmental stage-specific, inducible or repressible by externally added agents. This regulated control will result in genetic recombination of the target sequence only in cells where recombinase expression is mediated by the promoter element. Thus, the activation expression of a recombinant Delta3 protein can be regulated via control of recombinase expression.

[1097] Use of the cre/loxP recombinase system to regulate expression of a recombinant Delta3 protein requires the construction of a transgenic animal containing transgenes encoding both the Cre recombinase and the subject protein. Animals containing both the Cre recombinase and a recombinant Delta3 gene can be provided through the construction of “double” transgenic animals. A convenient method for providing such animals is to mate two transgenic animals each containing a transgene, e.g., a Delta3 gene and recombinase gene.

[1098] One advantage derived from initially constructing transgenic animals containing a Delta3 transgene in a recombinase-mediated expressible format derives from the likelihood that the subject protein, whether agonistic or antagonistic, can be deleterious upon expression in the transgenic animal. In such an instance, a founder population, in which the subject transgene is silent in all tissues, can be propagated and maintained. Individuals of this founder population can be crossed with animals expressing the recombinase in, for example, one or more tissues and/or a desired temporal pattern. Thus, the creation of a founder population in which, for example, an antagonistic Delta3 transgene is silent will allow the study of progeny from that founder in which disruption of Delta3 mediated induction in a particular tissue or at certain developmental stages would result in, for example, a lethal phenotype.

[1099] Similar conditional transgenes can be provided using prokaryotic promoter sequences which require prokaryotic proteins to be simultaneous expressed in order to facilitate expression of the Delta3 transgene. Exemplary promoters and the corresponding trans-activating prokaryotic proteins are given in U.S. Pat. No. 4,833,080.

[1100] Moreover, expression of the conditional transgenes can be induced by gene therapy-like methods wherein a gene encoding the trans-activating protein, e.g., a recombinase or a prokaryotic protein, is delivered to the tissue and caused to be expressed, such as in a cell-type specific manner. By this method, a Delta3 transgene could remain silent into adulthood until “turned on” by the introduction of the trans-activator.

[1101] In an exemplary embodiment, the “transgenic non-human animals” of the invention are produced by introducing transgenes into the germline of the non-human animal. Embryonal target cells at various developmental stages can be used to introduce transgenes. Different methods are used depending on the stage of development of the embryonal target cell. The specific line(s) of any animal used to practice this invention are selected for general good health, good embryo yields, good pronuclear visibility in the embryo, and good reproductive fitness. In addition, the haplotype is a significant factor. For example, when transgenic mice are to be produced, strains such as C57BL/6 or FVB lines are often used (Jackson Laboratory, Bar Harbor, Me.). Preferred strains are those with H-2b, H-2d or H-2q haplotypes such as C57BL/6 or DBA/1. The line(s) used to practice this invention may themselves be transgenics, and/or may be knockouts (i.e., obtained from animals which have one or more genes partially or completely suppressed).

[1102] In one embodiment, the transgene construct is introduced into a single stage embryo. The zygote is the best target for micro-injection. In the mouse, the male pronucleus reaches the size of approximately 20 micrometers in diameter which allows reproducible injection of 1-2 pl of DNA solution. The use of zygotes as a target for gene transfer has a major advantage in that in most cases the injected DNA will be incorporated into the host gene before the first cleavage (Brinster et al. (1985) PNAS 82:4438-4442). As a consequence, all cells of the transgenic animal will carry the incorporated transgene. This will in general also be reflected in the efficient transmission of the transgene to offspring of the founder since 50% of the germ cells will harbor the transgene.

[1103] Normally, fertilized embryos are incubated in suitable media until the pronuclei appear. At about this time, the nucleotide sequence comprising the transgene is introduced into the female or male pronucleus as described below. In some species such as mice, the male pronucleus is preferred. It is most preferred that the exogenous genetic material be added to the male DNA complement of the zygote prior to its being processed by the ovum nucleus or the zygote female pronucleus. It is thought that the ovum nucleus or female pronucleus release molecules which affect the male DNA complement, perhaps by replacing the protamines of the male DNA with histones, thereby facilitating the combination of the female and male DNA complements to form the diploid zygote.

[1104] Thus, it is preferred that the exogenous genetic material be added to the male complement of DNA or any other complement of DNA prior to its being affected by the female pronucleus. For example, the exogenous genetic material is added to the early male pronucleus, as soon as possible after the formation of the male pronucleus, which is when the male and female pronuclei are well separated and both are located close to the cell membrane. Alternatively, the exogenous genetic material could be added to the nucleus of the sperm after it has been induced to undergo decondensation. Sperm containing the exogenous genetic material can then be added to the ovum or the decondensed sperm could be added to the ovum with the transgene constructs being added as soon as possible thereafter.

[1105] Introduction of the transgene nucleotide sequence into the embryo may be accomplished by any means known in the art such as, for example, microinjection, electroporation, or lipofection. Following introduction of the transgene nucleotide sequence into the embryo, the embryo may be incubated in vitro for varying amounts of time, or reimplanted into the surrogate host, or both. In vitro incubation to maturity is within the scope of this invention. One common method in to incubate the embryos in vitro for about 1-7 days, depending on the species, and then reimplant them into the surrogate host.

[1106] For the purposes of this invention a zygote is essentially the formation of a diploid cell which is capable of developing into a complete organism. Generally, the zygote will be comprised of an egg containing a nucleus formed, either naturally or artificially, by the fusion of two haploid nuclei from a gamete or gametes. Thus, the gamete nuclei must be ones which are naturally compatible, i.e., ones which result in a viable zygote capable of undergoing differentiation and developing into a functioning organism. Generally, a euploid zygote is preferred. If an aneuploid zygote is obtained, then the number of chromosomes should not vary by more than one with respect to the euploid number of the organism from which either gamete originated.

[1107] In addition to similar biological considerations, physical ones also govern the amount (e.g., volume) of exogenous genetic material which can be added to the nucleus of the zygote or to the genetic material which forms a part of the zygote nucleus. If no genetic material is removed, then the amount of exogenous genetic material which can be added is limited by the amount which will be absorbed without being physically disruptive. Generally, the volume of exogenous genetic material inserted will not exceed about 10 picoliters. The physical effects of addition must not be so great as to physically destroy the viability of the zygote. The biological limit of the number and variety of DNA sequences will vary depending upon the particular zygote and functions of the exogenous genetic material and will be readily apparent to one skilled in the art, because the genetic material, including the exogenous genetic material, of the resulting zygote must be biologically capable of initiating and maintaining the differentiation and development of the zygote into a functional organism.

[1108] The number of copies of the transgene constructs which are added to the zygote is dependent upon the total amount of exogenous genetic material added and will be the amount which enables the genetic transformation to occur. Theoretically only one copy is required; however, generally, numerous copies are utilized, for example, 1,000-20,000 copies of the transgene construct, in order to insure that one copy is functional. As regards the present invention, there will often be an advantage to having more than one functioning copy of each of the inserted exogenous DNA sequences to enhance the phenotypic expression of the exogenous DNA sequences.

[1109] Any technique which allows for the addition of the exogenous genetic material into nucleic genetic material can be utilized so long as it is not destructive to the cell, nuclear membrane or other existing cellular or genetic structures. The exogenous genetic material is preferentially inserted into the nucleic genetic material by microinjection. Microinjection of cells and cellular structures is known and is used in the art.

[1110] Reimplantation is accomplished using standard methods. Usually, the surrogate host is anesthetized, and the embryos are inserted into the oviduct. The number of embryos implanted into a particular host will vary by species, but will usually be comparable to the number of off spring the species naturally produces.

[1111] Transgenic offspring of the surrogate host may be screened for the presence and/or expression of the transgene by any suitable method. Screening is often accomplished by Southern blot or Northern blot analysis, using a probe that is complementary to at least a portion of the transgene. Western blot analysis using an antibody against the protein encoded by the transgene may be employed as an alternative or additional method for screening for the presence of the transgene product. Typically, DNA is prepared from tail tissue and analyzed by Southern analysis or PCR for the transgene. Alternatively, the tissues or cells believed to express the transgene at the highest levels are tested for the presence and expression of the transgene using Southern analysis or PCR, although any tissues or cell types may be used for this analysis.

[1112] Alternative or additional methods for evaluating the presence of the transgene include, without limitation, suitable biochemical assays such as enzyme and/or immunological assays, histological stains for particular marker or enzyme activities, flow cytometric analysis, and the like. Analysis of the blood may also be useful to detect the presence of the transgene product in the blood, as well as to evaluate the effect of the transgene on the levels of various types of blood cells and other blood constituents.

[1113] Progeny of the transgenic animals may be obtained by mating the transgenic animal with a suitable partner, or by in vitro fertilization of eggs and/or sperm obtained from the transgenic animal. Where mating with a partner is to be performed, the partner may or may not be transgenic and/or a knockout; where it is transgenic, it may contain the same or a different transgene, or both. Alternatively, the partner may be a parental line. Where in vitro fertilization is used, the fertilized embryo may be implanted into a surrogate host or incubated in vitro, or both. Using either method, the progeny may be evaluated for the presence of the transgene using methods described above, or other appropriate methods.

[1114] The transgenic animals produced in accordance with the present invention will include exogenous genetic material. As set out above, the exogenous genetic material will, in certain embodiments, be a DNA sequence which results in the production of a Delta3 protein (either agonistic or antagonistic), and antisense transcript, or a Delta3 mutant. Further, in such embodiments the sequence will be attached to a transcriptional control element, e.g., a promoter, which preferably allows the expression of the transgene product in a specific type of cell.

[1115] Retroviral infection can also be used to introduce transgene into a non-human animal. The developing non-human embryo can be cultured in vitro to the blastocyst stage. During this time, the blastomeres can be targets for retroviral infection (Jaenich, R. (1976) PNAS 73:1260-1264). Efficient infection of the blastomeres is obtained by enzymatic treatment to remove the zona pellucida (Manipulating the Mouse Embryo, Hogan eds. (Cold Spring Harbor Laboratory Press, Cold Spring Harbor, 1986). The viral vector system used to introduce the transgene is typically a replication-defective retrovirus carrying the transgene (Jahner et al. (1985) PNAS 82:6927-6931; Van der Putten et al. (1985) PNAS 82:6148-6152). Transfection is easily and efficiently obtained by culturing the blastomeres on a monolayer of virus-producing cells (Van der Putten et al. (1985) PNAS 82:6148-6152; Stewart et al. (1987) EMBO J. 6:383-388). Alternatively, infection can be performed at a later stage. Virus or virus-producing cells can be injected into the blastocoele (Jahner et al. (1982) Nature 298:623-628). Most of the founders will be mosaic for the transgene since incorporation occurs only in a subset of the cells which formed the transgenic non-human animal. Further, the founder may contain various retroviral insertions of the transgene at different positions in the genome which generally will segregate in the offspring. In addition, it is also possible to introduce transgenes into the germ line by intrauterine retroviral infection of the midgestation embryo (Jahner et al. (1982) Nature 298:623-628).

[1116] A third type of target cell for transgene introduction is the embryonal stem cell (ES). ES cells are obtained from pre-implantation embryos cultured in vitro and fused with embryos (Evans et al. (1981) Nature 292:154-156; Bradley et al. (1984) Nature 309:255-258; Gossler et al. (1986) PNAS 83: 9065-9069; and Robertson et al. (1986) Nature 322:445-448). Transgenes can be efficiently introduced into the ES cells by DNA transfection or by retrovirus-mediated transduction. Such transformed ES cells can thereafter be combined with blastocysts from a non-human animal. The ES cells thereafter colonize the embryo and contribute to the germ line of the resulting chimeric animal. For review see Jaenisch, R. (1988) Science 240:1468-1474.

[1117] In one embodiment, gene targeting, which is a method of using homologous recombination to modify an animal's genome, can be used to introduce changes into cultured embryonic stem cells. By targeting a Delta3 gene of interest in ES cells, these changes can be introduced into the germlines of animals to generate chimeras. The gene targeting procedure is accomplished by introducing into tissue culture cells a DNA targeting construct that includes a segment homologous to a target Delta3 locus, and which also includes an intended sequence modification to the Delta3 genomic sequence (e.g., insertion, deletion, point mutation). The treated cells are then screened for accurate targeting to identify and isolate those which have been properly targeted.

[1118] Gene targeting in embryonic stem cells is in fact a scheme contemplated by the present invention as a means for disrupting a Delta3 gene function through the use of a targeting transgene construct designed to undergo homologous recombination with one or more Delta3 genomic sequences. The targeting construct can be arranged so that, upon recombination with an element of a Delta3 gene, a positive selection marker is inserted into (or replaces) coding sequences of the targeted Delta3 gene. The inserted sequence functionally disrupts the Delta3 gene, while also providing a positive selection trait. Exemplary Delta3 targeting constructs are described in more detail below.

[1119] Generally, the embryonic stem cells (ES cells) used to produce the knockout animals will be of the same species as the knockout animal to be generated. Thus for example, mouse embryonic stem cells will usually be used for generation of knockout mice.

[1120] Embryonic stem cells are generated and maintained using methods well known to the skilled artisan such as those described by Doetschman et al. (1985) J. Embryol. Exp. Morphol. 87:27-45). Any line of ES cells can be used, however, the line chosen is typically selected for the ability of the cells to integrate into and become part of the germ line of a developing embryo so as to create germ line transmission of the knockout construct. Thus, any ES cell line that is believed to have this capability is suitable for use herein. One mouse strain that is typically used for production of ES cells, is the 129J strain. Another ES cell line is murine cell line D3 (American Type Culture Collection, catalog NO: CKL 1934) Still another preferred ES cell line is the WW6 cell line (Ioffe et al. (1995) PNAS 92:7357-7361). The cells are cultured and prepared for knockout construct insertion using methods well known to the skilled artisan, such as those set forth by Robertson in: Teratocarcinomas and Embryonic Stem Cells: A Practical Approach, E. J. Robertson, ed. IRL Press, Washington, D.C. [1987]); by Bradley et al. (1986) Current Topics in Devel. Biol. 20:357-371); and by Hogan et al. (Manipulating the Mouse Embryo: A Laboratory Manual, Cold Spring Harbor Laboratory Press, Cold Spring Harbor, N.Y. [1986]).

[1121] Insertion of the knockout construct into the ES cells can be accomplished using a variety of methods well known in the art including for example, electroporation, microinjection, and calcium phosphate treatment. A preferred method of insertion is electroporation.

[1122] Each knockout construct to be inserted into the cell must first be in the linear form. Therefore, if the knockout construct has been inserted into a vector (described infra), linearization is accomplished by digesting the DNA with a suitable restriction endonuclease selected to cut only within the vector sequence and not within the knockout construct sequence.

[1123] For insertion, the knockout construct is added to the ES cells under appropriate conditions for the insertion method chosen, as is known to the skilled artisan. Where more than one construct is to be introduced into the ES cell, each knockout construct can be introduced simultaneously or one at a time.

[1124] If the ES cells are to be electroporated, the ES cells and knockout construct DNA are exposed to an electric pulse using an electroporation machine and following the manufacturer's guidelines for use. After electroporation, the ES cells are typically allowed to recover under suitable incubation conditions. The cells are then screened for the presence of the knockout construct.

[1125] Screening can be accomplished using a variety of methods. Where the marker gene is an antibiotic resistance gene, for example, the ES cells may be cultured in the presence of an otherwise lethal concentration of antibiotic. Those ES cells that survive have presumably integrated the knockout construct. If the marker gene is other than an antibiotic resistance gene, a Southern blot of the ES cell genomic DNA can be probed with a sequence of DNA designed to hybridize only to the marker sequence Alternatively, PCR can be used. Finally, if the marker gene is a gene that encodes an enzyme whose activity can be detected (e.g., b-galactosidase), the enzyme substrate can be added to the cells under suitable conditions, and the enzymatic activity can be analyzed. One skilled in the art will be familiar with other useful markers and the means for detecting their presence in a given cell. All such markers are contemplated as being included within the scope of the teaching of this invention.

[1126] The knockout construct may integrate into several locations in the ES cell genome, and may integrate into a different location in each ES cell's genome due to the occurrence of random insertion events. The desired location of insertion is in a complementary position to the DNA sequence to be knocked out, e.g., the Delta3 coding sequence, transcriptional regulatory sequence, etc. Typically, less than about 1-5% of the ES cells that take up the knockout construct will actually integrate the knockout construct in the desired location. To identify those ES cells with proper integration of the knockout construct, total DNA can be extracted from the ES cells using standard methods. The DNA can then be probed on a Southern blot with a probe or probes designed to hybridize in a specific pattern to genomic DNA digested with particular restriction enzyme(s). Alternatively, or additionally, the genomic DNA can be amplified by PCR with probes specifically designed to amplify DNA fragments of a particular size and sequence (i.e., only those cells containing the knockout construct in the proper position will generate DNA fragments of the proper size).

[1127] After suitable ES cells containing the knockout construct in the proper location have been identified, the cells can be inserted into an embryo. Insertion may be accomplished in a variety of ways known to the skilled artisan, however a preferred method is by microinjection. For microinjection, about 10-30 cells are collected into a micropipet and injected into embryos that are at the proper stage of development to permit integration of the foreign ES cell containing the knockout construct into the developing embryo. For instance, as the appended'Examples describe, the transformed ES cells can be microinjected into blastocytes.

[1128] The suitable stage of development for the embryo used for insertion of ES cells is very species dependent, however for mice it is about 3.5 days. The embryos are obtained by perfusing the uterus of pregnant females. Suitable methods for accomplishing this are known to the skilled artisan, and are set forth by, e.g., et al. (1986) Current Topics in Devel. Biol. 20:357-371.

[1129] While any embryo of the right stage of development is suitable for use, preferred embryos are male. In mice, the preferred embryos also have genes coding for a coat color that is different from the coat color encoded by the ES cell genes. In this way, the offspring can be screened easily for the presence of the knockout construct by looking for mosaic coat color (indicating that the ES cell was incorporated into the developing embryo). Thus, for example, if the ES cell line carries the genes for white fur, the embryo selected will carry genes for black or brown fur.

[1130] After the ES cell has been introduced into the embryo, the embryo may be implanted into the uterus of a pseudopregnant foster mother for gestation. While any foster mother may be used, the foster mother is typically selected for her ability to breed and reproduce well, and for her ability to care for the young. Such foster mothers are typically prepared by mating with vasectomized males of the same species. The stage of the pseudopregnant foster mother is important for successful implantation, and it is species dependent. For mice, this stage is about 2-3 days pseudopregnant.

[1131] Offspring that are born to the foster mother may be screened initially for mosaic coat color where the coat color selection strategy (as described above, and in the appended examples) has been employed. In addition, or as an alternative, DNA from tail tissue of the offspring may be screened for the presence of the knockout construct using Southern blots and/or PCR as described above. Offspring that appear to be mosaics may then be crossed to each other, if they are believed to carry the knockout construct in their germ line, in order to generate homozygous knockout animals. Homozygotes may be identified by Southern blotting of equivalent amounts of genomic DNA from mice that are the product of this cross, as well as mice that are known heterozygotes and wild type mice.

[1132] Other means of identifying and characterizing the knockout offspring are available. For example, Northern blots can be used to probe the mRNA for the presence or absence of transcripts encoding either the gene knocked out, the marker gene, or both. In addition, Western blots can be used to assess the level of expression of the Delta3 gene knocked out in various tissues of the offspring by probing the Western blot with an antibody against the particular Delta3 protein, or an antibody against the marker gene product, where this gene is expressed. Finally, in situ analysis (such as fixing the cells and labeling with antibody) and/or FACS (fluorescence activated cell sorting) analysis of various cells from the offspring can be conducted using suitable antibodies to look for the presence or absence of the knockout construct gene product.

[1133] Yet other methods of making knock-out or disruption transgenic animals are also generally known. See, for example, Manipulating the Mouse Embryo, (Cold Spring Harbor Laboratory Press, Cold Spring Harbor, N.Y., 1986). Recombinase dependent knockouts can also be generated, e.g., by homologous recombination to insert target sequences, such that tissue specific and/or temporal control of inactivation of a Delta-gene can be controlled by recombinase sequences (described infra).

[1134] Animals containing more than one knockout construct and/or more than one transgene expression construct are prepared in any of several ways. The preferred manner of preparation is to generate a series of mammals, each containing one of the desired transgenic phenotypes. Such animals are bred together through a series of crosses, backcrosses and selections, to ultimately generate a single animal containing all desired knockout constructs and/or expression constructs, where the animal is otherwise congenic (genetically identical) to the wild type except for the presence of the knockout construct(s) and/or transgene(s).

[1135] The present invention is further illustrated by the following examples which should not be construed as limiting in any way. The contents of all cited references (including literature references, issued patents, published patent applications as cited throughout this application are hereby expressly incorporated by reference. The practice of the present invention will employ, unless otherwise indicated, conventional techniques of cell biology, cell culture, molecular biology, transgenic biology, microbiology, recombinant DNA, and immunology, which are within the skill of the art. Such techniques are explained fully in the literature. See, for example, Molecular Cloning A Laboratory Manual, 2nd Ed., ed. by Sambrook, Fritsch and Maniatis (Cold Spring Harbor Laboratory Press: 1989); DNA Cloning, Volumes I and II (D. N. Glover ed., 1985); Oligonucleotide Synthesis (M. J. Gait ed., 1984); Mullis et al. U.S. Pat. No. 4,683,195; Nucleic Acid Hybridization (B. D. Hames & S. J. Higgins eds. 1984); Transcription And Translation (B. D. Hames & S. J. Higgins eds. 1984); Culture Of Animal Cells (R. I. Freshney, Alan R. Liss, Inc., 1987); Immobilized Cells And Enzymes (IRL Press, 1986); B. Perbal, A Practical Guide To Molecular Cloning (1984); the treatise, Methods In Enzymology (Academic Press, Inc., N.Y.); Gene Transfer Vectors For Mammalian Cells (J. H. Miller and M. P. Calos eds., 1987, Cold Spring Harbor Laboratory); Methods In Enzymology, Vols. 154 and 155 (Wu et al. eds.), Immunochemical Methods In Cell And Molecular Biology (Mayer and Walker, eds., Academic Press, London, 1987); Handbook Of Experimental Immunology, Volumes I-IV (D. M. Weir and C. C. Blackwell, eds., 1986); Manipulating the Mouse Embryo, (Cold Spring Harbor Laboratory Press, Cold Spring Harbor, N.Y., 1986).

### Electronic Apparatus Readable Media and Arrays

[1136] Electronic apparatus readable media comprising the SPOIL molecules of the present invention is also provided. As used herein, “electronic apparatus readable media” refers to any suitable medium for storing, holding or containing data or information that can be read and accessed directly by an electronic apparatus. Such media can include, but are not limited to: magnetic storage media, such as floppy discs, hard disc storage medium, and magnetic tape; optical storage media such as compact disc; electronic storage media such as RAM, ROM, EPROM, EEPROM and the like; general hard disks and hybrids of these categories such as magnetic/optical storage media. The medium is adapted or configured for having recorded thereon a marker of the present invention.

[1137] As used herein, the term “electronic apparatus” is intended to include any suitable computing or processing apparatus or other device configured or adapted for storing data or information. Examples of electronic apparatus suitable for use with the present invention include stand-alone computing apparatus; networks, including a local area network (LAN), a wide area network (WAN) Internet, Intranet, and Extranet; electronic appliances such as a personal digital assistants (PDAs), cellular phone, pager and the like; and local and distributed processing systems.

[1138] As used herein, “recorded” refers to a process for storing or encoding information on the electronic apparatus readable medium. Those skilled in the art can readily adopt any of the presently known methods for recording information on known media to generate manufactures comprising the SPOIL molecules of the present invention.

[1139] A variety of software programs and formats can be used to store the marker information of the present invention on the electronic apparatus readable medium. For example, the nucleic acid sequence corresponding to the SPOIL molecules can be represented in a word processing text file, formatted in commercially-available software such as WordPerfect and MicroSoft Word, or represented in the form of an ASCII file, stored in a database application, such as DB2, Sybase, Oracle, or the like, as well as in other forms. Any number of dataprocessor structuring formats (e.g., text file or database) may be employed in order to obtain or create a medium having recorded thereon the SPOIL molecules of the present invention.

[1140] By providing the SPOIL molecules of the invention in readable form, one can routinely access the marker sequence information for a variety of purposes. For example, one skilled in the art can use the nucleotide or amino acid sequences of the present invention in readable form to compare a target sequence or target structural motif with the sequence information stored within the data storage means. Search means are used to identify fragments or regions of the sequences of the invention which match a particular target sequence or target motif.

[1141] The present invention therefore provides a medium for holding instructions for performing a method for determining whether a subject has a bone metabolism disorder, an inflammatory disorder, or an immune disorder or a pre-disposition to a bone metabolism disorder, an inflammatory disorder, or an immune disorder, wherein the method comprises the steps of determining the presence, absence, or aberrant production of a SPOIL molecule or a SPOIL variant and based on the presence, absence or aberrant production of a SPOIL molecule or a SPOIL variant, determining whether the subject has a bone metabolism disorder, an inflammatory disorder, or an immune disorder or a pre-disposition to a bone metabolism disorder, an inflammatory disorder, or an immune disorder and/or recommending a particular treatment for the bone metabolism disorder, an inflammatory disorder, or an immune disorder.

[1142] The present invention therefore provides a medium for holding instructions for performing a method for determining whether a subject has a bone metabolism disorder, an inflammatory disorder, or an immune disorder or a pre-disposition to a bone metabolism disorder, an inflammatory disorder, or an immune disorder, wherein the method comprises the steps of determining the presence, absence, or aberrant production of a SPOIL molecule or a SPOIL variant and based on the presence, absence or aberrant production of a SPOIL molecule or a SPOIL variant, determining whether the subject has a bone metabolism disorder, an inflammatory disorder, or an immune disorder or a pre-disposition to a bone metabolism disorder, an inflammatory disorder, or an immune disorder and/or recommending a particular treatment for the bone metabolism disorder, an inflammatory disorder, or an immune disorder. The method may further comprise the step of receiving phenotypic information associated with the subject and/or acquiring from a network phenotypic information associated with the subject.

[1143] The present invention also provides in a network, a method for determining whether a subject has a hematological disorder or a pre-disposition to a bone metabolism disorder, an inflammatory disorder, or an immune disorder or a pre-disposition to a bone metabolism disorder, an inflammatory disorder, or an immune disorder associated with the SPOIL molecules, said method comprising the steps of receiving information associated with the SPOIL molecule, receiving phenotypic information associated with the subject, acquiring information from the network corresponding to the SPOIL molecule and its associated disorders, and based on one or more of the phenotypic information, the SPOIL molecule, and the acquired information, determining whether the subject has a bone metabolism disorder, an inflammatory disorder, or an immune disorder or a pre-disposition to a bone metabolism disorder, an inflammatory disorder, or an immune disorder. The method may further comprise the step of recommending a particular treatment for the bone metabolism disorder, the inflammatory disorder, or the immune disorder or a pre-disposition to the bone metabolism disorder, the inflammatory disorder, or the immune disorder.

[1144] The present invention also provides a business method for determining whether a subject has a bone metabolism disorder, an inflammatory disorder, or an immune disorder or a pre-disposition to a bone metabolism disorder, an inflammatory disorder, or an immune disorder, said method comprising the steps of receiving information associated with the SPOIL molecules, receiving phenotypic information associated with the subject, acquiring information from the network corresponding to the SPOIL molecules and its associated disorders, and based on one or more of the phenotypic information, the SPOIL molecule, and the acquired information, determining whether the subject has a bone metabolism disorder, an inflammatory disorder, or an immune disorder or a pre-disposition to a bone metabolism disorder, an inflammatory disorder, or an immune disorder. The method may further comprise the step of recommending a particular treatment for the bone metabolism disorder, the inflammatory disorder, or the immune disorder or a pre-disposition to the bone metabolism disorder, the inflammatory disorder, or the immune disorder.

[1145] The invention also includes an array comprising a SPOIL molecule of the present invention. The array can be used to assay expression of one or more genes in the array. In one embodiment, the array can be used to assay gene expression in a tissue to ascertain tissue specificity of genes in the array. In this manner, up to about 7600 genes can be simultaneously assayed for expression. This allows a profile to be developed showing a battery of genes specifically expressed in one or more tissues.

[1146] In addition to such qualitative determination, the invention allows the quantitation of gene expression. Thus, not only tissue specificity, but also the level of expression of a battery of genes in the tissue is ascertainable. Thus, genes can be grouped on the basis of their tissue expression per se and level of expression in that tissue. This is useful, for example, in ascertaining the relationship of gene expression between or among tissues. Thus, one tissue can be perturbed and the effect on gene expression in a second tissue can be determined. In this context, the effect of one cell type on another cell type in response to a biological stimulus can be determined. Such a determination is useful, for example, to know the effect of cell-cell interaction at the level of gene expression. If an agent is administered therapeutically to treat one cell type but has an undesirable effect on another cell type, the invention provides an assay to determine the molecular basis of the undesirable effect and thus provides the opportunity to co-administer a counteracting agent or otherwise treat the undesired effect. Similarly, even within a single cell type, undesirable biological effects can be determined at the molecular level. Thus, the effects of an agent on expression of other than the target gene can be ascertained and counteracted.

[1147] In another embodiment, the array can be used to monitor the time course of expression of one or more genes in the array. This can occur in various biological contexts, as disclosed herein, for example development of hematological disorder, progression of hematological disorder, and processes, such a cellular transformation associated with hematological disorder.

[1148] The array is also useful for ascertaining the effect of the expression of a gene on the expression of other genes in the same cell or in different cells. This provides, for example, for a selection of alternate molecular targets for therapeutic intervention if the ultimate or downstream target cannot be regulated.

[1149] The array is also useful for ascertaining differential expression patterns of one or more genes in normal and abnormal cells. This provides a battery of genes that could serve as a molecular target for diagnosis or therapeutic intervention.

[1150] This invention is further illustrated by the following examples which should not be construed as limiting. The contents of all references, patents and published patent applications cited throughout this application, as well as the Figures and the Sequence Listing are incorporated herein by reference.

### EXAMPLES

### Example 1

### Isolation of a Full-Length cDNA Encoding Human Delta3

[1151] Human microvascular endothelial cells (HMVEC catalog #CC2543; Clonetics, San Diego, Calif.) were separated into four samples of cells which were treated as follows. The first sample was untreated. The second sample was treated with human TGF-β1 (hTGF-β1) (10 ng/ml) (Upstate Biotechnology, Lake Placid, N.Y., Catalog NO: 01-134). The third sample was treated with bFGF (10 ng/ml)/VEGF (25 ng/ml) (Upstate Biotechnology, Lake Placid, N.Y., Catalog NO: 01-134, Catalog Nos. 01-106 and 01-185, respectively). The fourth sample was differentiated on Matrigel (Collaborative Biomedical Products, Becton Dickinson Labware, Bedford, Mass.). Cells were treated as indicated for 24 hours, the 4 samples were pooled, and RNA was extracted from the pooled cells using a QIAGEN RNeasy kit. The resulting cDNA library was subjected to high throughput random sequencing. This allowed identification of a cDNA fragment comprising the following 171 nucleotide long sequence:

(SEQ ID NO: 21)
GCCCAGGCNGACCCTGGTGTGGACTGTGAGCTGGAGCTCAGCGAGTGTGA
CAGCAACCCCTGTCGCANTGGAGGCAGCTGTAAGGACCANGAGGATGGCT
ACCACTGCCTGTGTCCTCCGGGCTACTACGGCNTGCATCGTGAACACNGC
ACCTCTTAGCTGNGCCGACTC.

[1152] Comparison of the nucleotide sequence of this partial cDNA with the sequences in GenBank using the BLAST program (Altschul et al. (1990) J. Mol. Biol. 215:403) revealed that the nucleotide sequence encoded a protein fragment having a significant homology to Delta proteins. In fact, the amino acid sequence had significant homology with a chicken Delta1 protein (GenBank Accession NO: U26590), a Xenopus Delta1 protein (GenBank Accession NO: L42229), a rat Delta1 protein (GenBank Accession NO: U78889), a Xenopus Delta2 protein (GenBank Accession NO: U70843) as well as Notch proteins.

[1153] A full-length cDNA of about 3.2 kb was then isolated by screening a human microvascular endothelial cell (HMVEC) cDNA library using the partial cDNA (SEQ ID NO:21). This nucleic acid was deposited at the American Type Culture Collection (ATCC®) on Mar. 5, 1997, and has been assigned ATCC® Accession NO: 98348. The nucleotide sequence of the cDNA isolated is shown in SEQ ID NO:1.

[1154] A nucleic acid sequence comparison of SEQ ID NO:1 against EST sequence databases using the BLAST program (Altschul et al. (1990) J. Mol. Biol. 215:403) indicated that 5 ESTs have a homology to portions of SEQ ID NO:1. These are all located 3′ of the nucleotide sequence encoding the transmembrane domain, i.e., downstream of nucleotide 1996 of SEQ ID NO:1. Three of these ESTs (having accession Nos. T33770, T33811, and T07963) have a nucleotide sequence starting at about nucleotide 2044 of SEQ ID NO:1. However, the nucleotide sequence of the three EST is significantly different from the nucleotide sequence of hDelta3 in about the first 50 nucleotides 3′ of nucleotide 2044 of SEQ ID NO:1. Two ESTs (having Accession Nos. R32717 and T07962) are located further downstream of the three ESTs.

[1155] The nucleic acid having SEQ ID NO:1 encodes a protein of 685 amino acids having SEQ ID NO:2. A comparison of the amino acid sequence of SEQ ID NO:2 with sequences in GenBank using BLASTP (Altschul et al. (1990) J. Mol. Biol. 215:403) reveals that this protein has a certain homology to previously described Delta proteins. An alignment of the human Delta3 protein having SEQ ID NO:2 with the amino acid sequence of mouse Delta1 protein (Accession NO: X80903), rat Delta1 protein (Accession NO: U78889), chicken Delta1 protein (Accession NO: U26590), two Xenopus Delta1 proteins (Accession Nos. L42229 and U70843) and Drosophila Delta1 protein (Accession NO: AA142228) indicates that human Delta3 protein has the general structure of a Delta3 protein. In particular, human Delta3 protein has a signal peptide corresponding to about amino acid 1 to about amino acid 17 of SEQ ID NO:2, a DSL motif corresponding to the sequence from about amino acid 173 to about amino acid 217, a first EGF-like domain corresponding to the sequence from about amino acid 222 to about amino acid 250, a second EGF-like domain corresponding to the sequence from about amino acid 253 to about amino acid 281, a third EGF-like domain corresponding to the sequence from about amino acid 288 to about amino acid 321, a fourth EGF-like domain corresponding to the sequence from about amino acid 328 to about amino acid 359, a fifth EGF-like domain corresponding to the sequence from about amino acid 366 to about amino acid 399, a sixth EGF-like domain corresponding to the sequence from about amino acid 411 to about amino acid 437, a seventh EGF-like domain corresponding to the sequence from about amino acid 444 to about amino acid 475, an eight EGF-like domain corresponding to the sequence from about amino acid 484 to about amino acid 517, a transmembrane domain corresponding to the sequence from about amino acid 530 to about amino acid 553, and a cytoplasmic domain corresponding to the sequence from about amino acid 554 to about amino acid 685 of SEQ ID NO:2.

[1156] An amino acid and nucleotide sequence comparison between the members of the Delta1 and Delta3 protein family and human Delta3 on one hand and between the members of the Delta1 family reveals that the homology between the Delta3 family members is stronger than the homology between human Delta3 and any of the Delta1 family members. For example, although hDelta3 is only approximately 58% similar to the Drosophila Delta1 protein; approximately 70% similar to the mouse Delta1 protein; approximately 70% similar to the rat Delta1 protein; approximately 68% similar to the chick Delta1 protein; and approximately 68% similar to the Xenopus Delta1 proteins; the drosophila, mouse, rat, chick and Xenopus Delta1 proteins are very similar to each other (e.g., the mouse and rat Delta1 are about 96% similar to each other). Published PCT application WO97/01571 discloses a partial nucleotide and amino acid sequence of a protein having significant homology to Delta1 family members, indicating that it is likely to be a human Delta1 protein. The homology between the partial amino acid sequence of human Delta1 and the amino acid sequence of human Delta3 is indicated in Table I and shows that the proteins are encoded by different genes. All these amino acid and nucleotide sequence comparisons indicate that human Delta3 is an additional species of Delta proteins, sharing some sequence and structure homology with the Delta1 proteins.

[1157] In one embodiment of a nucleotide sequence of human Delta3, the nucleotide at position 455 is a guanine (G) (SEQ ID NO:1). In this embodiment, the amino acid at position 40 is glutamate (E) (SEQ ID NO:2). In another embodiment of a nucleotide sequence of human Delta3, the nucleotide at position 455 is a cytosine (C) (SEQ ID NO:27). In this embodiment, the amino acid at position 40 is glutamine (Q) (SEQ ID NO:28). In another embodiment of a nucleotide sequence of human Delta3, the nucleotide at position 455 is a thymidine (T) (SEQ ID NO:29). In this embodiment, the amino acid at position 40 is a stop codon (SEQ ID NO:30). In another embodiment of a nucleotide sequence of human Delta3, the nucleotide at position 455 is a adenine (A) (SEQ ID NO:31). In this embodiment, the amino acid at position 40 is lysine (K) (SEQ ID NO:32).

[1158] In one embodiment of a nucleotide sequence of human Delta3, the nucleotide at position 786 is an cytosine (C) (SEQ ID NO:1). In this embodiment, the amino acid at position 150 is a alanine (A) (SEQ ID NO:2). In an alternative embodiment, a species variant of human Delta3 has a nucleotide at position 786 which is a thymidine (T) (SEQ ID NO:33). In this embodiment, the amino acid at position 150 is valine (V) (SEQ ID NO:34), i.e., a conservative substitution.

[1159] In one embodiment of a nucleotide sequence of human Delta3, the nucleotide at position 594 is a cytosine (C) (SEQ ID NO:1). In this embodiment, the amino acid at position 86 is threonine (T) (SEQ ID NO:2). In an alternative embodiment, a species variant of human Delta3 has a nucleotide at position 594 which is a guanine (G) (SEQ ID NO:35). In this embodiment, the amino acid at position 86 is serine (S) (SEQ ID NO:36), i.e., a conservative substitution.

[1160] In one embodiment of a nucleotide sequence of human Delta3, wherein the nucleotide at position 883 is a thymidine (T) (SEQ ID NO:1). In this embodiment, the amino acid at position 182 is aspartate (D) (SEQ ID NO:2). In an alternative embodiment, a species variant of human Delta3 has a nucleotide at position 883 which is an adenine (A) (SEQ ID NO:37). In this embodiment, the amino acid at position 182 is glutamate (E) (SEQ ID NO:38), i.e., a conservative substitution.

### Example 2

### Isolation of a Full-Length cDNA Encoding Mouse Delta3

[1161] A mouse Delta3 cDNA was identified from mouse lung database library of expressed sequences using the human Delta3 cDNA (SEQ ID NO:1) as a query sequence. The most homologous sequence, SEQ ID NO:24 was identified as a 3.2 kb cDNA.

[1162] The nucleic acid having SEQ ID NO:24 encodes a protein of 686 amino acids having the amino acid sequence shown in SEQ ID NO:25. An alignment of the human and mouse Delta3 proteins having SEQ ID NO:2 and 25, respectively, indicates that human and mouse Delta3 proteins have significant similarity and identity (i.e., 88.2% similar and 86.6% identical) suggesting evolutionary conservation due to an essential biological function.

[1163] Mouse Delta3 protein has a signal peptide corresponding to about amino acid 1 to about amino acid 17 of SEQ ID NO:25, a DSL motif corresponding to the sequence from about amino acid 174 to about amino acid 218, a first EGF-like domain corresponding to the sequence from about amino acid 223 to about amino acid 251, a second EGF-like domain corresponding to the sequence from about amino acid 254 to about amino acid 282, a third EGF-like domain corresponding to the sequence from about amino acid 289 to about amino acid 322, a fourth EGF-like domain corresponding to the sequence from about amino acid 329 to about amino acid 360, a fifth EGF-like domain corresponding to the sequence from about amino acid 367 to about amino acid 400, a sixth EGF-like domain corresponding to the sequence from about amino acid 412 to about amino acid 438, a seventh EGF-like domain corresponding to the sequence from about amino acid 445 to about amino acid 476, an eight EGF-like domain corresponding to the sequence from about amino acid 485 to about amino acid 518, a transmembrane domain corresponding to the sequence from about amino acid 531 to about amino acid 554, and a cytoplasmic domain corresponding to the sequence from about amino acid 555 to about amino acid 686 of SEQ ID NO:25.

[1164] In one embodiment of a nucleotide sequence of mouse Delta3, the nucleotide at position 49 is cytosine (C) (SEQ ID NO:24). In this embodiment, the amino acid at position 4 is alanine (A) (SEQ ID NO:25). In an alternative embodiment, a species variant of mouse Delta3 has a nucleotide at position 49 which is thymidine (T) (SEQ ID NO:39). In this embodiment, the amino acid at position 4 is valine (V) (SEQ ID NO:40), i.e., a conservative substitution.

[1165] In one embodiment of a nucleotide sequence of mouse Delta3, the nucleotide at position 51 is thymidine (T) (SEQ ID NO:24). In this embodiment, the amino acid at position 5 is serine (S) (SEQ ID NO:25). In an alternative embodiment, a species variant of mouse Delta3 has a nucleotide at position 51 which is a adenine (A) (SEQ ID NO:41). In this embodiment, the amino acid at position 5 is threonine (T) (SEQ ID NO:42), i.e., a conservative substitution.

[1166] In one embodiment of a nucleotide sequence of mouse Delta3, the nucleotide at position 109 is guanine (G) (SEQ ID NO:24). In this embodiment, the amino acid at position 24 is arginine (R) (SEQ ID NO:25). In an alternative embodiment, a species variant of mouse Delta3 has a nucleotide at position 109 which is adenine (A) (SEQ ID NO:43). In this embodiment, the amino acid at position 24 is histidine (H) (SEQ ID NO:44), i.e., a conservative substitution.

[1167] In one embodiment of a nucleotide sequence of mouse Delta3, wherein the nucleotide at position 130 is a thymidine (T) (SEQ ID NO:24). In this embodiment, the amino acid at position 31 is phenylalanine (F) (SEQ ID NO:25). In an alternative embodiment, a species variant of mouse Delta3 has a nucleotide at position 130 which is adenine (A) (SEQ ID NO:45). In this embodiment, the amino acid at position 31 is tyrosine (Y) (SEQ ID NO:46), i.e., a conservative substitution.

### Example 3

### Tissue Expression of the hDelta3 Gene

[1168] This Example describes the tissue distribution of Delta3 protein, as determined by Northern blot hybridization with a 1.6 kb fragment of human Delta3 cDNA corresponding to the extreme 3′ end of SEQ ID NO:1 and by in situ hybridization using a probe complementary to nucleotides 1290-1998 of SEQ ID NO:1.

[1169] Northern blot hybridizations with the various RNA samples were performed under standard conditions and washed under stringent conditions, i.e., in 0.2×SSC at 65° C. In each sample, the probe hybridized to a single RNA of about 3.5 kb. The results of hybridization of the probe to various mRNA samples are described below.

[1170] Hybridization of a Clontech Fetal Multiple Tissue Northern (MTN) blot (Clontech, LaJolla, Calif.) containing RNA from fetal brain, lung, liver, and kidney indicated the presence of Delta3 RNA in each of these fetal tissues. Expression was significantly higher in fetal lung and kidney than in fetal brain and liver. Hybridization of a Clontech human Multiple Tissue Northern I (MTNI) and Multiple Tissue Northern H (MTNII) blots (Clontech, LaJolla, Calif.) containing RNA from adult heart, brain, placenta, lung, liver, skeletal muscle, kidney, pancreas, spleen, thymus, prostate, testis, ovary, small intestine, mucosal lining of the colon, and peripheral blood leukocytes with the human 1.6 kb Delta3 probe indicated expression in heart, placenta, lung, skeletal muscle, kidney, pancreas, spleen, thymus, prostate, testis, ovary, small intestine and colon. Expression was particularly strong in adult heart, placenta, lung, and skeletal muscle. Expression was also found in adult brain, liver and testis. However, no significant amount of hDelta3 mRNA was detected in adult peripheral blood leukocytes.

[1171] Further, Northern blot hybridization of total mRNA from HMVEC cells treated with TGF-β1 at 10 ng/ml for 24 hours, bFGF at 10 ng/ml/VEGF at 25 ng/ml for 24 hours, or untreated for 24 hours indicated that Delta3 expression was induced upon induction with bFGF/VEGF. Accordingly, expression of Delta3 is up-regulated in HMV endothelial cells in response to certain growth factors.

[1172] Hybridization of a “cancer” Northern blot containing RNA from HL-60, HeLa, K562, Mol.T4, Raji, SW480, A549, and G361 cells, revealed that Delta3 is expressed at high levels in the colorectal carcinoma cell line SW480. Thus, Delta3 expression is high in at least certain tumor cells.

[1173] Delta-3 in situs on paraffin embedded mouse embryos were performed. Expression was seen in endothelial cells of the secondary vasculature and in preendothelial cells in the bone marrow. There is no expression in endothelial cells after day P 1.5.

[1174] For in situ hybridization analysis of mDelta3, 10m sagittal sections of fresh frozen day E13.5, E14.5, E15.5, E16.5, E18.5 and P1.5 embryos of B6 mice, as well as 8m cross sections of brain, spinal cord, eye and harderian gland, submandibular gland, white fat, stomach, heart, lung, liver, spleen, thymus, small intestine, lymph node, pancreas, skeletal muscle, testes, ovary, placenta, kidney and adrenal gland from adult B6 mice were used for hybridization. Sections were postfixed with 4% formaldehyde in DEPC-treated 1× phosphate-buffered saline at room temperature for 10 minutes before being rinsed twice in DEPC-treated 1× phosphate-buffered saline and once in 0.1 M triethanolamine-HCl (pH8.0). Following incubation in 0.25% acetic anhydride-0.1 M triethanolamine-HCl for 10 minutes, sections were rinsed in DEPC-treated 2×SSC (1×SSC is 0.15M NaCl plus 0.015M sodium citrate). Tissue was dehydrated through a series of ethanol washes, incubated in 100% chloroform for 5 minutes, and then rinsed in 100% ethanol for 1 minute and 95% ethanol for 1 minute and allowed to air dry.

[1175] The hybridization was performed using a ³⁵S-radiolabeled cRNA probe from the DNA sequence of nucleotides 1290-1998 of SEQ ID NO:1.

[1176] Tissues were incubated with probe (approximately 5×10⁷ cpm/ml) in the presence of a solution containing 600 mM NaCl, 10 mM Tris (pH 7.5), 1 mM EDTA, 0.01% sheared salmon sperm DNA, 0.01% yeast tRNA, 0.05% yeast total RNA type X1, 1×Denhardt's solution, 50% formamide, 10% dextran sulfate, 100 mM dithiothreitol, 0.1% sodium dodecylsulfate (SDS), and 0.1% sodium thiosulfate for 18 h at 55 C.

[1177] After hybridization, slides were washed with 2×SSC. Sections were then sequentially incubated at 37 C in TNE (a solution containing 10 mM Tris-HCl (pH 7.6), 500 mM NaCl, and 1 mM EDTA), for 10 minutes, in TNE with 10 ug of RNase A per ml for 30 minutes, and finally in TNE for 10 minutes. Slides were then rinsed with 2×SSC at room temp, washed with 2×SSC at 50° C. for 1 hour, washed with 0.2×SSC at 55° C. for 1 hour, and 0.2×SSC at 60° C. for 1 hour. Sections were then dehydrated rapidly through serial ethanol-0.3 M sodium acetate concentrations before being air dried and exposed to Kodak Biomax MR scientific imaging film for 6 days at room temperature. Expression was most abundant and wide spread during embryogenesis. Strongest expression was observed in the eye in all of the embryonic ages tested. Signal in a pattern suggestive of neuronal expression was not observed in any other tissues making the expression in the eye unique. Moderate ubiquitous expression was also detected in lung, thymus and brown fat during embryogenesis. A multifocal, scattered signal was also observed throughout the embryo. This signal pattern was more focused in the cortical region of the kidney and outlining the intestinal tract. Adult expression was highest in the ovary and the cortical regions of the kidney and adrenal gland.

[1178] Thus, Delta3 is expressed in numerous tissues, but is not detected in certain tissues, e.g., peripheral blood leukocytes and adult heart tissue (at least when using Northern blot hybridization), is expressed at relatively high levels in at least some tumor cells, e.g., colon carcinoma cells, and its expression can be up-regulated in response to some growth factors, e.g., bFGF and VEGF. Furthermore, in situ hybridization shows that mDelta3 is expressed most strongly in developing tissues of eye, thymus, lung and brown fat.

[1179] A Southern blot containing DNA from a panel of a human/hamster mono-chromosomal somatic cell hybrids was probed with an hDelta1cDNA probe. The results obtained clearly indicates that the human Delta3 gene resides on chromosome 15.

### Example 4

### Increased Expression of hDelta3 in Differentiating Endothelial Cells

[1180] This Example shows that the expression of the hDelta3 gene increases in differentiating endothelial cells relative to non-differentiating endothelial cells.

[1181] HMVEC cells were separated into 5 cultures and treated as follows: (1) cells were induced to quiescence by growth in basal endothelial growth medium (EGM) (Clontech) which contains 10% fetal calf serum (FCS); (2) cells were grown in complete endothelial growth medium (EGM-MV) (Clontech, Catalog NO: CC-3125) which contains 10% FCS and growth factors; (3) cells were stimulated to proliferate by culture in EGM-MV in the presence of bFGF at 10 ng/ml and VEGF at 25 ng/ml; (4) cells were stimulated to proliferate by culture in EGM-MV in the presence of TGF-131 at 10 ng/ml; and (5) cells were stimulated to differentiate by culture in EGM-MV on Matrigel. After 24 hours of culture, the cells were harvested, the RNA was extracted and submitted to Northern blot analysis. Hybridization was performed with the 1.6 kb hDelta3 probe described above. The results indicate that among the culture conditions tested, quiescent cells express the lowest amount of hDelta3 (at a barely detectable level). Cells which are proliferating express a higher level of hDelta3. Interestingly, the mRNA level of hDelta3 was strongly increased in cells induced to differentiate by plating on Matrigel.

[1182] Thus, this Example clearly demonstrates that hDelta3 expression is strongly increased in cells induced to differentiate and also in cells induced to proliferate.

### Example 5

### hDelta3 is Located in a Chromosomal Region Associated with ACCPN

[1183] The location of hDelta3 on human chromosome 15 was determined using radiation hybrid (RH) mapping.

[1184] A sequence tagged site (STS) was generated from the 3′ untranslated region of the gene using a forward primer having the nucleotide sequence GTTTACATTGCATCCTGGAT (SEQ ID NO:51) and a reverse primer having the nucleotide sequence CTCTTCTGTTCCTCTGGTTG (SEQ ID NO:22). The STS was used to screen the Genebridge 4 (Gyapay et al. (1996) Human Molecular Genetics 5:339) and the Standford G3 (Stewart et al. (1997) Genome Res. 7:422) radiation hybrid panels. These panels were derived by fusion of irradiated human donor cells with rodent recipient cells and can be used for positioning STS markers within existing framework maps, ordering markers in the region of interest as well as establishing the distance between markers.

[1185] RH mapping was performed by PCR under the following conditions: 25 ng DNA/20 μl reaction, 0.5 μM of each primer, 0.2 mM of each nucleotide, 1.5 mM MgCl₂, 1× buffer as provided by the manufacturer of the enzyme, 35 cycles at 94° C., 55° C., 72° C. for 30 seconds each.

[1186] The results of the RH mapping indicated that hDelta3 maps to 15q12-15 close to framework marker D15S1244 on the Stanford G3 panel and close to framework marker D15S144 on the Genebridge 4 panel with a LOD score>3. Searching of the OMIM database (Online Mendelian Inheritance in Man) indicated that this region has previously been genetically linked to a neurological disorder called Agenesis of the Corpus Callosum with Peripheral Neuropathy (ACCPN) (Casaubon et al. (1996) Am. J. Hum. Genet. 58:28).

### Example 6

### Delta3 Encodes A Notch Ligand

[1187] The example presented herein demonstrates that Delta3 encodes a Notch Ligand. In particular, the data presented herein shows, first, that hDelta3 encodes a functional Notch ligand as determined by its ability to block differentiation of C2C12 cells. When C2C12 cells are co-cultured, under low mitogenic conditions, with NIH3T3 cells expressing a Notch ligand, the differentiation to myotubes by the C2C12 cells is blocked. (Lindsell et al. (1995) Cell 80:909). If the cells differentiate troponin T is expressed, if differentiation is blocked no troponin T expression is seen. In addition, the data presented herein directly demonstrates that Delta3 binds Notch one and Notch 2. Third, the data presented in this section identifies several cell types that endogenously exhibit Delta3 receptors.

[1188] To determine whether hDelta3 in fact encodes a functional Notch ligand, NIH3T3 cells were engineered to express hDelta3, co-cultured with C2C12 cells and analyzed for troponin T expression. Briefly, NIH3T3 cells were infected with a retrovirus containing the hDelta3 coding region cloned into the MIGR retroviral vector (Pear et al. (1998) Blood 92:3780). This vector contains an Internal Ribosome Entry Site (IRES) downstream of the cloning site, followed by the cDNA for the green fluorescent protein (GFP). GFP expression from the vector is monitored to assess the efficiency of transduction of the vector into the target cells. C2C12 cells were plated in 10 cm dishes and cultured in DMEM media with 10%

[1189] Inactivated Fetal Calf Serum (10% IFS) until 70% confluent. C2C12 cells were then washed 1× with PBS. 5×10⁶ NIH3T3 cells harboring either an empty vector, a vector expressing hDelta3 or a vector expressing Jagged-1 were resuspended in 10 mls DMEM media containing 10% Horse serum (10% HS), and laid on top of the C2C12 cells.

[1190] Control experiments involved the solitary culture of C2C12 cells in differentiation media (10% HS) as well as in growth media (10% IFS). The whole population of cells was lysed three to four days later and equal amounts of protein was resolved on an SDS-polyacrylamide gel. The proteins were then transferred onto a nitrocellulose membrane and probed with an anti-Troponin T antibody (Sigma, 1:200). A secondary incubation with an anti-mouse antibody conjugated to horseradish peroxidase allowed for detection using chemiluminescence reagents (Amersham). When cells NIH3T3 cells containing the empty vector were co-cultured with C2C12 cells, troponin T was expressed, indicating that the C2C12 cells had indeed differentiated into myotubes. When NIH3T3 cells expressing hDelta3 were co-cultured with C2C12 cells, no expression of troponin T was seen, indicating that C2C12 differentiation was blocked by hDelta3. This result is similar to that seen when NIH3T3 cells expressing Jagged 1 (a functional Notch ligand).

[1191] Next, Delta3 was tested for its ability to bind human notch1 and notch2. 293T cells were transiently transfected with expression plasmids (PCMV poly-neo) encoding full-length Notch1 or Notch2. Two days after transfection cells were incubated with purified protein consisting of the extracellular domain of hDelta3 fused in frame to the Fc portion of immunoglobulin G (hDelta3-Fc) at 10 μg/ml or with control protein consisting of human immunoglobulin G1 (hIgG1) at 10 ug/ml in stainig buffer (PBS containing 3% fetal calf serum, 1 mM CaCl₂ and 0.02% sodium azide). After one hour of incubation, cells were washed three times in staining buffer and bound protein was detected by incubating the cells with FITC-conjugated anti-human IgG for 30 minutes. Cells were analyzed under fluorescence microscopy.

[1192] Binding of hDelta3-Fc fusions to cells expressing Notch1 and Notch2 but not to cells transfected with empty expression vector, was detected. Binding was calcium-dependent and was abolished in the presence of 5 mM EDTA. Control-Fc fusions and hIgG1 did not show any binding to transfected cells. These results establish hDelta3 as a ligand for Notch1 and Notch2 and show that the extracellular domain of hDelta3 is suffcient to mediate binding to Notch.

[1193] Therefore, Delta3, including hDelta3, represents a polypeptide which can function as a bona fide Notch ligand.

[1194] Next, Cell lines were tested for the presence of an endogenous receptor for hDelta3. Briefly, cells were washed two times in staining buffer and incubated with hDelta3-Fc or hIgG1 (10 μg/ml in staining buffer) at a cell concentration of 5×10⁶ per ml. After an incubation of one hour on ice, cells were washed three times in staining buffer and bound protein was detected by incubating the cells with FITC-conjugated secondary antibody (anti-human hIgG1) for 30 min on ice. Cells were analyzed by flow cytometry on a FACSCalibur. Binding of hDelta3-Fc was seen to Jurkat, 32D, C2C12 and Cos cells. A control Fc fusion protein and hIgG1 did not show binding to these cell lines. The binding of hDelta3-Fc was dependent on calcium since the binding was abolished by the addition of 5 mM EDTA to the binding buffer.

### Example 7

### Delta3 Affects Early Development and Muscle Cell Differentiation

[1195] The data presented herein demonstrate that among the roles of Delta3 is a function that involves early development and muscle cell differentiation.

### Materials and Methods

[1196] Preparation of hDelta3 RNA: The template for the hDelta3 in vitro transcription reaction was prepared from the DNA construct containing the hDelta3 sequence inserted in a pCS2++ vector, which was then linearized using AscI. Capped RNA was synthesized using SP6 RNA polymerase from the linearized plasmid using mMESSAGE mMACHINE kit (Ambion, Austin, Tex.) according to the manufacturer's instructions. In vitro transcribed capped RNA was purified using RNAesy kit (Qiagen) and analyzed by gel electrophoresis.

[1197] HDelta3 RNA injection into Xenopus embryos: Xenopus embryos were obtained by in vitro fertilization, dejellied in 2% cysteine HCl (pH 7.6), washed thoroughly in Modified Ringer's solution, and incubated at 15-25° C. Embryos were transferred to injection solution (Modified Ringer's solution containing 3% Ficoll) prior to injections. One ng and 2.5 ng of hDelta3 RNA were injected into one blastomere at the 2-cell stage. Embryos were transferred to 0.1×MMR from the injection solution after approximately 6 hours and grown until the appropriate stage.

[1198] Embryos for histological examination were fixed in 4% formaldehyde in PBS overnight, embedded in paraffin and stained with Heidenhain's Azan stain by standard procedures. Transverse sections of injected embryos show disruption of somitic organization and somite boundaries on the injected side.

[1199] Xenopus animal cap assay: 2 ng of hDelta3 RNA was injected into the animal pole of each of the 2 Xenopus blastomeres at the 2-cell stage. Animal caps from uninjected or injected embryos were explanted at stage 9 and cultured in 1XModified Ringers containing 0.01% BSA and 50 ug/ml gentamycin. Animal caps were cultured until control embryos have reached stage23-24. Animal cap tissue was lysed and total RNA was extracted using RNeasy kit (Qiagen). RT-PCRs were performed on these samples using gene-specific primers and appropriate annealing temperatures and the products analyzed by gel electrophoresis. The primers used in this experiment were specific to genes EF1-alpha, XCG-1, NCAM, Xbra, M-actin, Sox-17 (Amaravadi et al. (1997). Dev. Biol. 192:392-404). RT-PCR analysis did not indicate expression of any of the specific marker genes tested.

### Results:

[1200] Examination of embryos injected with hDelta3 RNA two days post-injection showed an overexpression phenotype involving axial disruption indicative of an effect on somites and anterior dorsal structures such as eyes and cement glands were not well differentiated in half of the injected embryos. These results suggest that hDelta3 has an effect on early tissue development/differentiation.

[1201] The differential stain used in this study also indicated an enlargement of somite size on the injected side demonstrating that hDelta3 has an effect on muscle cells and overexpression can lead to enlarged muscle mass. Notch/Delta signaling has been shown to play a key role in somitogenesis/myogenesis in various species (Wittenberger et al., (1999) EMBO J. 18:915-922); Dornseifer et al. (1997) Mech. Dev. 63:159-171); Kusumi et al. (1998) Nat. Genet. 19:274-278).

[1202] Therefore, the results presented herein indicate that Delta3 can be involved in early development (e.g., can have a role downstream of germ layer specification function), and can be involved in modulating myogenesis and muscle cell differentiation.

### Example 8

### Identification of Delta Therapeutics

[1203] This Example describes a simple assay for isolating Delta therapeutics, (e.g., agonist or antagonist of a Delta activity), e.g., Delta3 therapeutics. Based at least in part on the results described in the previous Examples, Delta therapeutics can be used for treating various diseases, including neurological diseases, and/or hyper- or hypoproliferative diseases, hematologic disorders, immunodeficiency states and diseases or conditions associated with defects in vasculature and/or conditions requiring neovascularization and/or conditions hallmarked by aberrant neovascularization, e.g., diabetic retinopathy. In addition, based at least in part on the similarity of amino acid sequence and structure between the various Delta proteins, Delta3 therapeutics can be used to treat diseases or conditions associated with an aberrant Delta3 activity or an aberrant Delta activity other than a Delta3 activity. Similarly, Delta3 therapeutics as well as Delta therapeutics other than Delta3 therapeutics can be used to treat diseases or conditions associated with an aberrant Delta3 activity. The assay set forth below is applicable to Delta proteins other than Delta3 proteins.

[1204] A Delta3 therapeutic can be identified by using an in vitro assay, in which the interaction between a Delta3 protein and a Delta3 binding protein, e.g., a Notch protein, is determined in the presence and in the absence of a test compound. A soluble binding fragment of a Delta3 protein can be prepared by expression of the extracellular portion of human Delta3, e.g., about amino acids 1-529 of SEQ ID NO:2 or about amino acids 1-530 of SEQ ID NO:25, in E. coli according to methods known in the art. Alternatively, the Delta3 protein fragment can be about amino acid 173 to about amino acid 517 of SEQ ID NO:2 or from about amino acid 174 to about amino acid 508 of SEQ ID NO:25. Similarly, a Delta3 binding fragment of a Delta3 binding protein (i.e., Delta3 binding partner) can be produced recombinantly.

[1205] A Delta3 binding protein can be a Notch protein and can be identified, e.g., by determining whether the protein is capable of binding to a Delta3 protein. A nucleic acid encoding a Notch protein can be obtained, e.g., by PCR amplifying a portion of a Notch gene encoding at least an EGF-like domain, using primers having a nucleotide sequence derived from the nucleotide sequence of a Notch gene present in GenBank or disclosed in PCT Application NO: PCT/US92/03651 or PCT/US93/09338.

[1206] Test compounds can then be tested to determine whether they inhibit the interaction between the Delta3 and the Delta3 binding protein by using an ELISA type assay. Accordingly, one of the recombinantly produced Delta3 protein and the Delta3 binding protein, e.g., Notch protein, is attached to a solid phase surface and the other protein is labeled, e.g., such as by tagging the protein with an epitope, for which an antibody is available (e.g., FLAG epitope, available from International Biotechnologies, Inc.). As a non-limiting example of an assay, the Delta3 protein can be linked to the wells of a microtiter (96 well) plate by overnight incubation of the protein at a concentration of 10 μg/ml in PBS. After blocking unoccupied sites on the plate with a BSA solution, various amounts of test compounds and the recombinantly produced Delta3 binding protein are added to the wells in a buffer suitable for a specific interaction between the proteins.

[1207] After an incubation time of several hours, the wells are rinsed with buffer, and the amount of Delta3 binding protein attached to the wells is determined. The amount of bound protein can be determined by incubating the wells with an anti-tag, e.g., anti-myc, antibody, which can then be detected by enzyme immunoassay. The amount of bound protein is then determined by determining the optical density using an ELISA reader. A lower amount of Delta3 binding protein in a well that contained a test compound relative to a well that did not contain a test compound is indicative that the test compound inhibits the interaction between Delta3 and a Delta3 binding protein.

[1208] In a further non-limiting example of a binding assay, a recombinantly produced and labeled Delta3 polypeptide, or fragment thereof capable of binding a Delta3 binding protein, is incubated, with or without a test compound, with cells expressing the Delta3 binding protein (Shimizu et al. (1999) J. Biol. Chem. 274:32961-32969). Alternatively, the recombinant Delta3 polypeptide is not labeled and is detected upon binding the cell by a second Delta3 binding protein, such as an antibody. A lower amount of Delta3 binding protein in a well that contained a test compound relative to a well that did not contain a test compound is indicative that the test compound inhibits the interaction between Delta3 and a Delta3 binding protein.

[1209] A Delta3 therapeutic can also be identified by using a reporter assay in which the level of expression of a reporter construct under the control of a Delta3 promoter is measured in the presence or absence of a test compound. A Delta3 promoter can be isolated by screening a genomic library with a Delta3 cDNA which preferably contains the 5′ end of the cDNA. A portion of the Delta3 promoter, typically from about 50 to about 500 base pairs long is then cloned upstream of a reporter gene, e.g., a luciferase gene, in a plasmid. This reporter construct is then transfected into cells, e.g., neural cells or endothelial cells. Transfected cells are then be distributed into wells of a multiwell plate and various concentrations of test compounds are added to the wells. After several hours incubation, the level of expression of the reporter construct is determined according to methods known in the art. A difference in the level of expression of the reporter construct in transfected cells incubated with the test compound relative to transfected cells incubated without the test compound will indicate that the test compound is capable of modulating the expression of the Delta3 gene and is thus a Delta3 therapeutic.

### Example 9

### Isolation and Characterization of Human FTHMA-070 cDNAs

[1210] The nucleic acid molecule encoding FTMA-070 was identified during the sequencing of clones present in a cardiac coronary artery smooth muscle cell library. A clone was identified which appeared to have some homology to TNF receptor. This clone proved to encode FTHMA-070. The nucleic acid sequence and deduced amino acid sequence of FTHMA-070, which has homology to tumor necrosis factor receptor (including the death domain) are shown in SEQ ID NO:53 and SEQ ID NO:54, respectively.

### Example 10

### Characterization of FTHMA-070 Proteins

[1211] The human FTHMA-070 cDNA isolated as described above (SEQ ID NO:53) encodes a 401 amino acid protein (SEQ ID NO:54). FTHMA-070 is predicted to include a 21 amino acid signal peptide (amino acid 1 to about amino acid 21 of SEQ ID NO:54) preceding the 380 mature protein (about amino acid 22 to amino acid 401; SEQ ID NO:56).

### Example 11

### Preparation of FTHMA-070 Proteins

[1212] Recombinant FTHMA-070 can be produced in a variety of expression systems. For example, the mature FTHMA-070 peptide can be expressed as a recombinant glutathione-S-transferase (GST) fusion protein in E. coli and the fusion protein can be isolated and characterized. Specifically, as described above, FTHMA-070 can be fused to GST and this fusion protein can be expressed in E. coli strain PEB199. Expression of the GST-FTHMA-070 fusion protein in PEB 199 can be induced with IPTG. The recombinant fusion protein can be purified from crude bacterial lysates of the induced PEB 199 strain by affinity chromatography on glutathione beads.

### Example 12

### Isolation and Characterization of Human FTHMA-070 cDNAs

[1213] The nucleic acid molecule encoding T85 (originally called FMHB-6D4 and FMHB-SD4) was identified using a screen designed to identify genes encoding proteins having a functional signal sequence. Briefly, a library was prepared in which each of the clones contained a human fetal brain cDNA ligated to a sequence encoding a detectable protein which lacked a signal sequence. If the human fetal cDNA encodes a functional signal sequence, it will permit the secretion and detection of the detecable protein. This clone library was used to transfect mammalian cells. Clones which secreted the detectable protein were then identified and the corresponding human fetal brain cDNA was isolated and sequenced using standard techniques. In this way it was possible to identify a clone encoding T85. The nucleic acid sequence and deduced amino acid sequence of T85 are shown in SEQ ID NO:57 and SEQ ID NO:58, respectively.

### Example 13

### Characterization of T85 Proteins

[1214] The human T85 cDNA isolated as described above (SEQ ID NO:57) encodes a 753 amino acid protein (SEQ ID NO:58). The signal peptide prediction program SIGNALP (Nielsen et al. (1997) Protein Engineering 10:1-6) predicted that T85 includes a 20 amino acid signal peptide (amino acid 1 to about amino acid 20 of SEQ ID NO:58) preceding the 733 amino acid mature protein (about amino acid 21 to amino acid 753 of SEQ ID NO:58; SEQ ID NO:60). For general information regarding PFAM identifiers and Hidden Markov Model (HMM) consensus sequences refer to Sonnhammer et al. (1997) Protein 28:405-420.

[1215] T85 has a two regions (amino acids 525-610 and 638-727 of SEQ ID NO:58; SEQ ID NO:61 and SEQ ID NO:62, respectively) of homology to a fibronectin type III domain (based on HMM PF00041; SEQ ID NO:70). Also, T85 has a five regions (amino acids 43-101; 145-203; 237-298; 329-394; and 433-491 of SEQ ID NO:58; SEQ ID NOs:63-67) of homology to a Ig superfamily domain. T85 also includes an RGD motif starting at amino acid 247 of SEQ ID NO:58; a cytokine receptor homolgy N-terminal (BC) domain (CC-CC) at amino acids 516-600 of SEQ ID NO:58.

### Example 14

### Preparation of T85 Proteins

[1216] Recombinant T85 can be produced in a variety of expression systems. For example, the mature T85 peptide can be expressed as a recombinant glutathione-S-transferase (GST) fusion protein in E. coli and the fusion protein can be isolated and characterized. Specifically, as described above, FTHMA-070 can be fused to GST and this fusion protein can be expressed in E. coli strain PEB 199. Expression of the GST-T85 fusion protein in PEB 199 can be induced with IPTG. The recombinant fusion protein can be purified from crude bacterial lysates of the induced PEB 199 strain by affinity chromatography on glutathione beads.

### Example 15

[1217] As shown in FIGS. 2A-D, T85 exhibits considerable homology to human Robo protein (Kidd et al. (1997) Cell 92:205-215), an axon guidance receptor that is thought to play and important role in neuronal development, specifically, control of midline crossing. Accordingly, T85 may also play a role in neuronal development. Thus, T85 nucleic acids, polpeptides, T85 agonists, and T85 antagonists may be useful in the treatment of neurological disorders.

### Example 16

### Isolation and Characterization of Human Tango-77 cDNAs

[1218] Cytokine genes IL-1α, IL-1β and IL-1ra have been found to be closely clustered on chromosome 2, i.e., IL-1α, IL-1β and IL-1ra are located within 450 kb of each other. BAC clones containing IL-1α and IL-1β were used to identify other proximal unknown cytokine genes. To do this, a BAC clone containing IL-1α and IL-1β was selected from a BAC library (Research Genetics, Huntsville, Ala.) using specific primers designed against IL-1α and IL-1β. The DNA from the BAC was extracted and used to make a random-sheared genomic library. From this BAC library, 4000 clones were selected for sequencing. The resulting genomic sequences were then assembled into contigs and used to screen proprietary and public data bases. One genomic contig was found to contain two segments of sequences which resemble IL-1ra. These two segments are potential exons of Tango-77 gene.

[1219] Two PCR primers were then designed from the two potential exons and used to screen a panel of cDNA libraries for the expression of a Tango-77 message. A cDNA library from TNF-α treated human lung epithelia showed a positive band of the predicted size (i.e., if the two exons are spliced together). Using the PCR fragment as a probe, a single cDNA clone was isolated from the same library. This cDNA contains an insert of 989 bp. The cDNA clone contains three possible open reading frames. The first open reading frame encompasses 534 nucleotides (nucleotides 356-889 of SEQ ID NO:71; SEQ ID NO:73) and encodes a 178 amino acid protein (SEQ ID NO:72). This protein may include a predicted signal sequence of about 63 amino acids (from amino acid 1 to about amino acid 63 of SEQ ID NO:72 (SEQ ID NO:74)) and a predicted mature protein of about 115 amino acids (from about amino acid 64 to amino acid 178 of SEQ ID NO:72 (SEQ ID NO:75)).

[1220] The second putative nucleotide open reading frame encompasses 498 nucleotides (nucleotides 389-889 of SEQ ID NO:71; SEQ ID NO:76) and encodes a 167 amino acid protein (SEQ ID NO:77). This protein includes a predicted signal sequence of about 52 amino acids (from amino acid 1 to about amino acid 52 of SEQ ID NO:77 (SEQ ID NO:78)) and a predicted mature protein of about 115 amino acids (from about amino acid 53 to amino acid 167 of SEQ ID NO:77 (SEQ ID NO:79)).

[1221] The third open reading frame (nucleotides 372-889 of SEQ ID NO:71; SEQ ID NO:80) encompasses 408 nucleotides and encodes a 136 amino acid protein (SEQ ID NO:81). This protein includes a predicted signal sequence of about 21 amino acids (from amino acid 1 to about amino acid 21 of SEQ ID NO:81 (SEQ ID NO:82)) and a predicted mature protein of about 115 amino acids (from about amino acid 22 to amino acid 136 of SEQ ID NO:81 (SEQ ID NO:83)).

[1222] Tango-77 is predicted to be 35% identical to human IL-1ra at the amino acid level.

### Example 17

### Expression of Tango-77 mRNA in Human Tissues

[1223] The expression of Tango-77 was analyzed using Northern blot hybridization. A PCR generated 989 by Tango-77 product was radioactively labeled with ³²P-dCTP using the Prime-It kit (Stratagene; La Jolla, Calif.) according to the instructions of the supplier. Filters containing human mRNA (MTNI and MTN11: Clontech; Palo Alto, Calif.) were probed in ExpressHyb hybridization solution (Clontech) and washed at high stringency according to manufacturer's recommendations.

[1224] Tango-77 mRNA was not detected in any unstimulated tissues (brain, liver, spleen, skeletal muscle, testis, pancreas, heart, kidney and peripheral blood leukocytes) mRNA on Clontech Northern blots.

[1225] Over 96 cDNA libraries were then tested for the presence of Tango-77 using PCR amplification. Only three libraries displayed a positive signal. These libraries were the TNFα-treated bronchoepithelium, TNFα-treated SSC cell line and anti-CD3-treated T cells.

### Example 18

### Characterization of Tango-77 Proteins

[1226] In this example, the predicted amino acid sequence of human Tango-77 protein was compared to the amino acid sequence of known protein IL-1ra. In addition, the molecular weight of the human Tango-77 proteins was predicted.

[1227] The human Tango-77 cDNA (SEQ ID NO:71) isolated as described above encodes a 178 amino acid protein (SEQ ID NO:72) or a 167 amino acid protein (SEQ ID NO:77) or a 136 amino acid protein (SEQ ID NO:81). The signal peptide prediction program SIGNALP Optimized Tool (Nielsen et al. (1997) Protein Engineering 10:1-6) predicted that Tango-77 includes a 63 amino acid signal peptide (amino acid 1 to about amino acid 63 of SEQ ID NO:72 (SEQ ID NO:74)) preceding the 115 mature protein; or preceding the 115 mature protein (about amino acid 52 to amino acid 167 of SEQ ID NO:77 (SEQ ID NO:78)); or preceding the 115 mature protein (about amino acid 21 to amino acid 136 of SEQ ID NO:81; SEQ ID NO:82).

[1228] As shown in FIG. 3, Tango-77 has a region of homology to IL-1ra (SEQ ID NO:84).

[1229] Mature Tango-77 has a predicted MW of about 13 kDa and the predicted MW for the immature Tango-77 is 19.6 kDa, 18.5 kDa or 15.2 kDa, not including post-translational modifications.

### Example 19

### Preparation of Tango-77 Proteins

[1230] Recombinant Tango-77 can be produced in a variety of expression systems. For example, the mature Tango-77 peptide can be expressed as a recombinant glutathione-S-transferase (GST) fusion protein in E. coli and the fusion protein can be isolated and characterized. Specifically, as described above, Tango-77 can be fused to GST and this fusion protein can be expressed in E. coli strain PEB 199. Expression of the GST-Tango-77 fusion protein in PEB 199 can be induced with IPTG. The recombinant fusion protein can be purified from crude bacterial lysates of the induced PEB199 strain by affinity chromatography on glutathione beads.

### Example 20

### Alternatively Spliced Forms of IL-1ra and Tango-77

[1231] Computer program Procrustes (Gelfand et al., 1996, Proc. Natl. Acad. Sci. USA, 93:9061-9066) is an alignment algorithm that predicts the presence of alternatively spliced exons for a protein of interest in a stretch of genomic DNA. Using the IL-1ra sequence, Proscustes was used to search for the presence of additional sequences that might encode for alternatively spliced forms of IL-1ra in the two overlapping BAC genomic sequences. Potential sequences that encode variant exons for IL-1ra were identified. These predicted exons aligned well with the N-terminal region of IL-1ra, but were not present in Tango-77. The results from Procrustes predicts the existence of more spliced forms of IL-1ra.

[1232] Furthermore, Procrustes also predicted an additional sequence in BAC1 (SEQ ID NO:86) and BAC2 (SEQ ID NO:87) that encodes an alternatively spliced exon for Tango-77 (T77-procrustes). This predicted splice variant form of Tango-77, T77-procrustes, was aligned with Tango-77 and with IL-1ra and IL-1β.

[1233] PCR primers within this sequence can be used to generate a product that can be used to screen a panel of cDNA libraries using standard techniques. Suitable cDNA libraries include libraries made from TNFα-treated bronchoepithelium, TNFα-treated SSC cell line and anti-CD3-treated T cells. The resulting cDNA clone(s) can be isolated from the library and sequenced to identify additional Tango-77 cDNAs.

### Example 21

### Isolation and Characterization of Human and Murine SPOIL cDNAs

[1234] In this example, the isolation of the genes encoding human and murine SPOIL proteins (also referred to as “TANGO 080” proteins) are described.

Isolation of Murine SPOIL-I and SPOIL-II cDNAs

[1235] A murine SPOIL-I cDNA was identified by searching with a murine cDNA encoding an IL-1 signature region (Prosite™ Accession Number PD0000226) against a copy of the GenBank nucleotide database using the BLASTNTM program (BLASTN 1.3 MP: Altschul et al., J. Mol. Bio. 215:403, 1990). A clone with 48% homology with the murine cDNA IL-1 signature region was found by this search. The sequence was analyzed against a non-redundant protein database with the BLASTXTM program, which translates a nucleic acid sequence in all six frames and compares it against available protein databases (BLASTX 1.3 MP:Altschul et al., supra). This protein database is a combination of the SwissProt, PIR, and NCBI GenPept protein databases. One clone was obtained from the IMAGE consortium, and fully sequenced. The additional sequencing of this clone extended the original EST by 267 nucleotides at both the 5′ and 3′ ends. The cDNA for this clone is approximately 746 nucleotides in length and has an open reading frame of 297 nucleotides that is predicted to encode a protein of 98 amino acids.

[1236] The original first pass sequence of the clone showed homology to horse IL-1ra and murine IL-1ra using the BLASTX™ program. The nucleotide sequence and predicted amino acid sequences are shown in SEQ ID NO:89 and SEQ ID NO:90, respectively. The murine SPOIL-I protein (corresponding to amino acids 1-98 of the predicted amino acid sequence, SEQ ID NO:90) shows 37.0% identity to the horse IL-1ra protein and 39.0% identity to the murine IL-1ra protein.

[1237] Alignment of murine SPOIL-I protein with murine IL-1a (SwissProt™ Accession Number P01582) and murine IL-1β (SwissProt™ Accession Number P10749) indicates the presence of an aspartic acid at amino acid residue 91 of SEQ ID NO:90 and amino acid residue 74 of SEQ ID NO:93 which corresponds to an aspartic acid found at amino acid residue 266 of murine IL-1α and amino acid residue 261 of murine IL-1β. In addition, alignment of murine SPOIL-I with murine IL-1ra indicates that this aspartic acid residue of SPOIL-I corresponds with a lysine at amino acid residue 171 of murine IL-1ra (or amino acid residue 145 of mature murine IL-1ra) which has been shown to convert IL-1ra into an agonist by mutating this lysine residue to an aspartic acid residue. (Ju et al. (1991) Proc. Natl. Acad. Sci. USA 88:2658-2662).

[1238] This murine SPOIL-I protein contains an IL-1 signature domain (corresponding to amino acids 58-80 of the predicted amino acid sequence, SEQ ID NO:90 and amino acids 41-63 of SEQ ID NO:93) and a signal sequence (corresponding to amino acids 1-17 of the predicted amino acid sequence, SEQ ID NO:90) which is cleaved to form a mature SPOIL-I protein (corresponding to amino acids 1-81 of SEQ ID NO:93). The predicted molecular weight for the 98 amino acid SPOIL-I is approximately 10.96 kDa and the predicted molecular weight for mature SPOIL-I (SEQ ID NO:93) is approximately 9.1 kDa.

[1239] A GenBank™ search using the murine SPOIL nucleotide sequence of SEQ ID NO:89 revealed a human EST (W78043) which was similar to a region of the nucleotide sequence of SEQ ID NO:89. As no reading frame can be determined from an EST (such as the EST identified in the above database search) an amino acid sequence encoded by an EST can not be determined.

[1240] The entire cDNA of mouse SPOIL-I was used as a probe to screen a mouse esophagus library to search for alternate SPOIL transcripts. A second form of mouse SPOIL was isolated and sequenced. This second form encodes a protein of 160 amino acid residues that lacks a signal peptide. Accordingly, this isoform, designated murine SPOIL-II is predicted to be an intracellular protein. Alignment of the 2 mouse SPOIL proteins (FIG. 5B) shows that they are identical at the C-terminus but have differing N-termini. For example, murine SPOIL-I and SPOIL-II exhibit 100% identity when amino acid residues 29-98 of murine SPOIL-I are aligned to amino acid residues 91-160 of murine SPOIL-II. It is predicted that the two isoforms of murine SPOIL are splice variants of the murine SPOIL gene.

[1241] A global alignment of murine SPOIL-I (SEQ ID NO:90) with murine SPOIL-II (SEQ ID NO:113) using the ALIGN program version 2.0 (global alignment program, Myers and Miller, CABIOS, 1989) using a PAM120 weight residue table, a gap length penalty of 12 and a gap penalty of 4 indicated that the proteins are 46.3% identical over the entire length of the sequences (FIG. 5B).

Isolation of Human SPOIL-I and SPOIL-II cDNAs

[1242] A cDNA library was constructed using mRNA isolated from near confluent monolayers of human keratinocytes (Clonetics™) which had been stimulated with 50 ng/ml PMA, 1 μg/ml ionomycin, 10 ng/ml TNF, and 40 μg/ml cycloheximide for 4 hours. EST sequencing information was gathered to create a proprietary database of information describing the keratinocyte cDNA clones. Three clones were identified by performing a TBLASTN search of the proprietary EST database using the sequence of murine SPOIL-I as a query sequence (the three clones having a probability score of at least 1.4e-48).

[1243] The nucleotide sequence and predicted amino acid sequences of human SPOIL-I are shown in SEQ ID NO:101 and SEQ ID NO:102, respectively. The nucleotide sequence and predicted amino acid sequences of human SPOIL-II are shown in SEQ ID NO:104 and SEQ ID NO:105, respectively. A global alignment of human SPOIL-I (SEQ ID NO:102) with human SPOIL-II (SEQ ID NO:105) using the ALIGN program version 2.0 (global alignment program, Myers and Miller, CABIOS, 1989) using a PAM120 weight residue table, a gap length penalty of 12 and a gap penalty of 4 indicated that the proteins are 80.8% identical over the entire length of the sequences (FIG. 5A).

[1244] As was the case with the two murine isoforms of SPOIL, the two human SPOIL isoforms exhibit exact identity at the C-terminus and are variant at their N-termini. Human SPOIL-II has an insertion of 40 amino acid residues close to the N-terminus of the protein which are not present in human SPOIL-I. Like murine SPOIL-II, both human SPOIL isoforms lack a signal sequence, and accordingly, are predicted to be intracellular proteins. Human SPOIL-I and SPOIL-II may be splice variants of a common gene. An alignment of human SPOIL-I (SEQ ID NO:102) with murine SPOIL-I (SEQ ID NO:90) using the ALIGN program (parameters set as described for the alignment of human SPOILS I and H) indicated that the proteins are 26.3% identical over the entire length of the sequences, e.g., global alignment. Moreover, using the same program and parameters, it was determined that the nucleic acids which encode murine SPOIL-I (SEQ ID NO:89) and human SPOIL-II (SEQ ID NO:101) are 39.8% identical at the nucleotide level. An alignment of human SPOIL-II (SEQ ID NO:105) with murine SPOIL-II (SEQ ID NO:113) using the ALIGN program (parameters set as described above) indicated that the proteins are 37.3% identical over the entire length of the sequences, e.g., global alignment.

[1245] When locally aligned, the identity between the four SPOIL proteins described above is significant. TABLE VII sets forth the % identity among SPOIL family members (when the C-terminal unique domains of each family member are compared). Moreover, TABLE VII sets forth the % identity between each SPOIL C-terminal unique domain and murine IL-1ra. The alignment was performed using the Lipman-Pearson Algorithm (Lipman et al. (1985) Science 227:1435-1441), with a K-tuple of 2, a Gap Penalty of 4, and a Gap Weight Penalty of 12.

TABLE VII

| | muSPOIL-I | muSPOIL-II | huSPOIL-I | huSPOIL-II | muIL-1ra |
|---|---|---|---|---|---|
| muSPOIL-I | 100 | | | | |
| muSPOIL-II | 97.1 | 100 | | | |
| huSPOIL-I | 52.2 | 53.6 | 100 | | |
| huSPOIL-II | 52.2 | 53.6 | 100 | 100 | |
| muIL-ra | 36.2 | 37.7 | 39.7 | 39.7 | 100 |

[1246] Alignment of the four SPOIL family members resulted in the generation of at least two SPOIL consensus motifs, due to the highly conserved nature of specific amino acid residues among the family members. The SPOIL consensus motifs (“SPOIL signature motifs”) are set forth as SEQ ID NOs:110-111 (SEQ ID NO:110 corresponds to the short SPOIL signature motif and SEQ ID NO:111 corresponds to the long SPOIL consensus motif). Short and long SPOIL consensus motifs are found, for example, from amino acid residues 26-69 and 26-93 of muSPOIL-I, from residues 88-131 and 88-155 of muSPOIL-II, from residues 98-141 and 98-164 of huSPOIL-I, and from residues 137-180 and 137-203 of huSPOIL-II.

[1247] Further alignment of the intracellular SPOIL isoforms indicates that the proteins have at least 50% identity among the SPOIL unique domains of the proteins. TABLE VIII sets forth the % identity among SPOIL family members (when the SPOIL unique domains of each family member are compared). The alignment was performed using the Lipman-Pearson Algorithm (Lipman et al. (1985) Science 227:1435-1441), with a K-tuple of 2, a Gap Penalty of 4, and a Gap Weight Penalty of 12.

TABLE VIII

| | muSPOIL-II | huSPOIL-I | huSPOIL-II |
|---|---|---|---|
| muSPOIL-II | 100 | | |
| huSPOIL-I | 50.3 | 100 | |
| huSPOIL-II | 50.3 | 100 | 100 |

### Example 22

### Distribution and Expression of SPOIL-I mRNA in Mouse and Human Tissues in Situ Hybridization Analysis of Mouse Tissues

[1248] In situ analysis revealed the following expression patterns when tissue sections were hybridized with SPOIL-I probes. SPOIL-I mRNA was expressed almost exclusively in the squamous epithelium of the esophagus in both adult and embryonic mouse tissues. SPOIL-I mRNA was also expressed in the epithelial lining of the mouth in adult mouse tissues and embryonic mouse tissues.

[1249] Moreover, in situ analysis of tissue samples for mice which had been intravenously injected with 20 mg/kg of lippopolysaccharide (LPS) revealed that SPOIL-I expression was induced in the kidney.

### Northern Blot Analysis of Human Tissues

[1250] Northern blot analysis of human tissues confirmed the pattern of SPOIL expression with SPOIL-I transcripts being detected in esophagus and, likely, trachea, among the tissues tested. In addition, SPOIL-I was also present on human esophageal tumor samples and overexpressed in moderately differentiated squamous cell carcinoma of the esophagus.

### Expression of SPOIL in Human and Mouse Cell Lines

[1251] Human SPOIL-I expression was induced in keratinocytes (Clonetics) 2 hours following induction with 50 ng/ml PMA, 1 ug/mL ionomycin, 10 ng/ml TNF and 40 ug/mL cyclohexamide. No expression was observed in unstimulated cultures.

[1252] Moreover, inducible expression of mouse SPOIL-I was observed in the monocytic cell line J774, 24 h after treatment with 0.1 μg/ml LPS.

### Example 23

### Expression of Recombinant SPOIL-I Protein in Bacterial Cells

[1253] SPOIL can be expressed as a recombinant glutathione-S-transferase (GST) fusion polypeptide in E. coli and the fusion polypeptide can be isolated and characterized. Specifically, SPOIL is fused to GST and this fusion polypeptide is expressed in E. coli, e.g., strain PEB199. As, for example, the murine SPOIL-I protein is predicted to be approximately 9.1 kDa and the GST is predicted to be approximately 26 kDa, the fusion polypeptide is predicted to be approximately 35.1 kDa in molecular weight. Expression of the GST-SPOIL-I fusion protein in PEB199 is induced with IPTG. The recombinant fusion polypeptide is purified from crude bacterial lysates of the induced PEB 199 strain by affinity chromatography on glutathione beads. Using polyacrylamide gel electrophoretic analysis of the polypeptide purified from the bacterial lysates, the molecular weight of the resultant fusion polypeptide is determined.

### Example 24

### Expression of Recombinant SPOIL Proteins in COS Cells

[1254] To express the murine SPOIL-I gene, for example, in COS cells, the pcDNA/Amp vector by Invitrogen Corporation (San Diego, Calif.) is used. This vector contains an SV40 origin of replication, an ampicillin resistance gene, an E. coli replication origin, a CMV promoter followed by a polylinker region, and an SV40 intron and polyadenylation site. A DNA fragment encoding the entire SPOIL-I protein and a HA tag (Wilson et al. (1984) Cell 37:767) fused in-frame to its 3′ end of the fragment is cloned into the polylinker region of the vector, thereby placing the expression of the recombinant protein under the control of the CMV promoter.

[1255] To construct the plasmid, the SPOIL-I DNA sequence is amplified by PCR using two primers. The 5′ primer contains the restriction site of interest followed by approximately twenty nucleotides of the SPOIL-I coding sequence starting from the initiation codon; the 3′ end sequence contains complementary sequences to the other restriction site of interest, a translation stop codon, the HA tag and the last 20 nucleotides of the SPOIL-I coding sequence. The PCR amplified fragment and the pcDNA/Amp vector are digested with the appropriate restriction enzymes and the vector is dephosphorylated using the CIAP enzyme (New England Biolabs, Beverly, Mass.). Preferably the two restriction sites chosen are different so that the SPOIL-I gene is inserted in the correct orientation.

[1256] The ligation mixture is transformed into E. coli cells (strains HB101, DH5a, SURE, available from Stratagene Cloning Systems, La Jolla, Calif., can be used), the transformed culture is plated on ampicillin media plates, and resistant colonies are selected. Plasmid DNA is isolated from transformants and examined by restriction analysis for the presence of the correct fragment.

[1257] COS cells are subsequently transfected with the SPOIL-I-pcDNA/Amp plasmid DNA using the calcium phosphate or calcium chloride co-precipitation methods, DEAE-dextran-mediated transfection, lipofection, or electroporation. Other suitable methods for transfecting host cells can be found in Sambrook, J., Fritsh, E. F., and Maniatis, T. Molecular Cloning: A Laboratory Manual. 2nd, ed., Cold Spring Harbor Laboratory, Cold Spring Harbor Laboratory Press, Cold Spring Harbor, N.Y., 1989. The expression of the SPOIL-I protein is detected by radiolabelling (³⁵S-methionine or ³⁵S-cysteine available from NEN, Boston, Mass., can be used) and immunoprecipitation (Harlow, E. and Lane, D. Antibodies: A Laboratory Manual, Cold Spring Harbor Laboratory Press, Cold Spring Harbor, N.Y., 1988) using an HA specific monoclonal antibody. Briefly, the cells are labeled for 8 hours with ³⁵S-methionine (or ³⁵S-cysteine). The culture media are then collected and the cells are lysed using detergents (RIPA buffer, 150 mM NaCl, 1% NP-40, 0.1% SDS, 0.5% DOC, 50 mM Tris, pH 7.5). Both the cell lysate and the culture media are precipitated with an HA specific monoclonal antibody. Precipitated proteins are then analyzed by SDS-PAGE.

[1258] Alternatively, DNA containing the SPOIL-I coding sequence is cloned directly into the polylinker of the pcDNA/Amp vector using the appropriate restriction sites. The resulting plasmid is transfected into COS cells in the manner described above, and the expression of the SPOIL-I protein is detected by radiolabelling and immunoprecipitation using a SPOIL-I specific monoclonal antibody

### Example 25

### Retroviral Delivery of SPOIL Proteins

[1259] Full length SPOIL-I genes were expressed in vivo by retroviral-mediated infection. In this example, the sequence for murine SPOIL-I (amino acids 1-98) was amplified using the following primers;

Forward Primer (SEQ ID NO: 96):
5′ AAAAAAGAAT TCGCCACCAT GTTCAGGATC TTA 3′
Reverse Primer (SEQ ID NO: 97):
5′ TCCTCTGTCG ACTCACTTGT CGTCGTCGTC CTTGTAGTCA
TGTACCACAA TCAT 3′

[1260] The reverse primer placed an epitope tag (Flag sequence) on the 3′ end of the protein. Amplified products were then subcloned into the retroviral vector MSCVneo (Hawley et al. (1994) Gene Therapy 1:136-138), and sequence verified. Bone marrow from 5-fluorouracil treated mice infected with the retrovirus was then transplanted into irradiated mouse recipients and the pathology was reviewed after 5 weeks.

[1261] The spleen and bones of the mouse recipients were taken 5 weeks after transplantation. Disassociated spleen cells, which are a source of osteoclast progenitors, from the SPOIL-I infected mice were plated on top of ST2 bone marrow stromal line in the presence of 1, 25 dihdroxyvitamin D3 as described by Lacey et al. (1995) Endocrinology 136:2367-2376 and Udagawa et al. (1989) Endocrinology 125:1805-1813. In addition, spleen cells from control mice transplanted with marrow infected with retrovirus without the inserted SPOIL-I gene, were plated. After nine days of culture, the number of osteoclasts was determined by staining for tartrate resistant acid phosphatase (TRAP).

[1262] The results of these experiments demonstrated that the number of TRAP positive osteoclasts was dramatically decreased in cultures with the SPOIL-I infected spleen cells as compared to the control cells. Histologically, the bones of mice recipients transplanted with SPOIL-I infected marrow, also appeared to be thicker than the bones of the corresponding control mice. Generally, there was less trabecular bone at the growth plate. The trabecular bone was compressed and thickened with more osteoloid formation and more osteoblasts present.

### Example 26

### Identification And Characterization of NEOKINE-1 cDNAs

[1263] In this example, the identification and characterization of the genes encoding human, murine, rat and macaque NEOKINE-1 (also referred to as “ANTIKINE-1”, “TANGO 112”, or T112) is described.

Isolation of the Murine and Human NEOKINE-1 cDNAs

[1264] The invention is based, at least in part, on the discovery of the murine and human genes encoding a novel protein, referred to herein as NEOKINE-1. In order to identify potentially novel chemokines, using an automated procedure, the human amino acid sequences of the chemokines, interleukin-8, gamma-IP10, Sis-Delta, fractalkine, and SDF-1 were used to search proprietary databases and the dbEST databases using TBLASTN (Wash U. version, 2.0, BLOSUM62 search matrix). Sequences exhibiting 90% or greater identity to any protein present in Genpept, SwissProt, or PIR were marked as examples of these proteins and removed. This analysis identified a mouse EST (accession number AA013634) potentially encoding a chemokine. As the encoded protein was quite divergent from all other chemokine family members, and the open reading frame constituted a small percentage of the total cDNA length (see below), to establish whether this transcript encoded a novel chemokine family member, the nucleotide sequence of the entire cDNA was determined. To do this, first, additional ESTs from the mouse gene were retrieved from public databases by similarity searches. A total of 33 murine sequences were thus retrieved. Second, these sequences were used to create an extensive length of continuous sequence (contig). The 33 murine ESTs were aligned and edited at discrepant bases into a single contig of 1420 bp. The 5′ end of the contig appeared to be missing part of the open reading frame. To extend this sequence, the sizes of the inserts of several of the murine cDNA clones from which the ESTs were derived was determined and one with the largest insert (about 1.45 kb) was subsequently re-sequenced in its entirety. This extended the sequence by 5 bp to 1425 bp and corrected some remaining discrepancies.

[1265] 72 human ESTs from a presumptive human orthologue of the above-described mouse gene were identified. However, these ESTs, after a similar assembly and editing, aligned into two non-overlapping contigs of 364 and 1101 bp. Comparison with the murine sequence suggested that the 364-bp contig derived from the 5′ part of the human gene, while the 1101-bp contig derived from the 3′ part of the human gene and included the poly(A) tail. The distribution of 5′ EST reads implied that there was no cDNA clone which contained both halves of the gene. At the 3′ end of the 5′ contig, there was a naturally occurring run of adenosine nucleotides (see below), to which the oligo-d(T) primer used in reverse transcription would have annealed (i.e., this primer would have annealed at two sites: the actual poly (A) tail and this internal oligo (A) stretch). This ectopic primer would have blocked reverse transcription in the human sequence at about 1.1 kb from the 3′ end, but also would have allowed a second set of cDNA molecules to be synthesized which covered the 5′ end of the gene. The two human EST contigs that can be derived from these 72 ESTs therefore would appear on inspection and in the absence of further information, to derive from two genes instead of one. That this is the case is shown by the fact that automated assembly of ESTs produced distinct “UniGene” numbers for the two contigs (Hs.21210 for the 5′ contig and Hs.24395 for the 3′ contig).

[1266] To establish that the two human contigs derived from the same transcript, two primers lacking oligo d(T) were designed from the two assembled human contigs such that they would amplify an ˜300 bp fragment spanning the contigs. Using first-strand cDNA prepared from human placental poly (A)+ RNA, a unique ˜300 bp fragment aws amplified by standard techniques. This cDNA was subsequently cloned and sequenced. The sequence did span the two contigs and provided the missing sequence between them. The primers were h112/227f (CCAAGCGCTTCATCAAGTGG) (SEQ ID NO:125) and h112/526r (GCAGCCTGTGATGAAGTCTGG) (SEQ ID NO:126).

[1267] The 5′ end of the contig, which included part of the open reading frame, was missing from the assembled single contig. To obtain the complete transcript sequence at the 5′ end for the human gene, a cDNA clone (rthp112) extending from the 5′ end of the human transcript to beyond the end of the open reading frame was generated by the RACE procedure. The gene-specific primer used was t112racel (CAGCCTATTCTTCGTAGACCCTGC) (SEQ ID NO:127). The 5′-most 35 bp of this clone formed a palindrome and thus appeared to be a cloning artifact, as is well known in the art, and was removed from the final sequence. The remaining sequence extended the human cDNA sequence by 108 bp to 1564 bp and corrected some remaining discrepancies. Clone rthp112, comprising the entire coding region of human NEOKINE-1 has been deposited with the ATTC and has Accession No. 98751.

[1268] The nucleotide sequence encoding the human NEOKINE-1 protein is set forth as SEQ ID NO:115. The full length protein encoded by this nucleic acid is comprised of about 99 amino acids and has the amino acid sequence set forth as SEQ ID NO:116. The coding portion (open reading frame) of SEQ ID NO:115 is set forth as SEQ ID NO:117.

[1269] To identify a murine cDNA clone containing a near full-length insert, the sizes of the inserts of several of the murine cDNA clones from which the ESTs were derived was determined and one with the largest insert (about 1.45 kb) was subsequently re-sequenced in its entirety. This extended the sequence by 5 bp to 1425 bp and corrected some remaining discrepancies.

[1270] The nucleotide sequence encoding the murine NEOKINE-1 protein is set forth as SEQ ID NO:118. The full length protein encoded by this nucleic acid is comprised of about 92 amino acids and has the amino acid sequence set forth as SEQ ID NO:119. The coding portion (open reading frame) of SEQ ID NO:118 is set forth as SEQ ID NO:120.

### Analysis of Murine and Human NEOKINE-1

[1271] Examination of the assembled and corrected cDNA sequences depicted in SEQ ID NO:115 and SEQ ID NO:118 showed that they likely encoded highly-conserved proteins, human and mouse NEOKINE-1. Based on the presence of 4 cysteine residues, which presumably form 2 disulfide bonds, a predicted signal sequence, a predicted mature peptide mass of about 10,000 daltons, and a characteristic spacing of one residue between the first two cysteines, it was judged that the encoded protein was a novel member of the alpha chemokine family, and a member of the subfamily that lacked the glutamine-leucine-arginine sequence before the first cysteine. However, three atypical features were also present but conserved between species. These were, first, the presence of an extra 5 residues between the second pair of cysteines; second, the fewest residues before the predicted amino terminus of the mature protein and the first cysteine of any naturally-occurring chemokine; and third, a general dissimilarity to all other chemokines in the region between the second and third cysteines.

[1272] A BLAST search (Altschul et al. (1990) J. Mol. Biol. 215:403) of the nucleotide sequence of human NEOKINE-1 has revealed that NEOKINE-1 is significantly similar to a human STS (TIGR-A002114, Accession No. G26440) which was sequenced as part of the WI/MIT human gene mapping project and derived from a TIGR-assembled contig that lacks any of the open reading frame of human NEOKINE-1. (The TIGR-assembled contig failed to reveal the true ORF of human NEOKINE-1, most likely to the existence of a significant number of potential ORFs which fortuitously exist in the long 3′ UTR of the human NEOKINE cDNA, but do not, in fact encode the human NEOKINE-1 protein.) The gene is located to human 5q31.1 near the marker D5S396, distinct from the chemokine cluster on chromosome 4q. Plausible human disease genes that map to this region include a hereditary eosinophilia (EOS) and a hereditary high serum IgE associated with hypersuppression of inflammation in the skin (IGES).

[1273] The clones of both the human and murine EST sequences used in the assembly of the human and murine contigs derive predominantly from prenatal tissues. In particlular, 6 human ESTs derive from clones isolated from neonatal female placenta, 4 human ESTs derive from clones isolated from 8-9-week placenta, 4 human ESTs derive from clones isolated from fetal heart, 4 human ESTs derive from clones isolated from 20-week male liver and spleen, 4 human ESTs derive from clones isolated from breast tumor, 4 human ESTs derive from clones isolated from colon tumor, 3 human ESTs derive from clones isolated from adult breast, 2 human ESTs derive from clones isolated from pregnant uterus, 2 human ESTs derive from clones isolated from endometrial tumor, 1 human EST derives from a clone isolated from fetal brain, 1 human EST derives from a clone isolated from alveolar rhabdomyosarcoma, 1 human EST derives from a clone isolated fromovary tumor, 1 human EST derives from a clone isolated from 8-9-week total fetus, 1 human EST derives from a clone isolated from TIGR placenta II, 1 human EST derives from a clone isolated from corneal stroma, 1 human EST derives from a clone isolated from 3m muscular atrophy, 1 human EST derives from a clone isolated from thyroid tumor, 1 human EST derives from a clone isolated from a 6-week embryo, and 1 human EST derives from a clone isolated from a 12-week embryo.

[1274] 11 murine ESTs derive from clones isolated from 13.5+14.5d whole embryo, 5 murine ESTs derive from clones isolated from 19.5d embryo, 4 murine ESTs derive from clones isolated from 8.5d embryo, 3 murine ESTs derive from clones isolated from 12.5d embryo, 3 murine ESTs derive from clones isolated from 7d kidney. 2 murine ESTs derive from clones isolated from 13.5+14.5d placenta, 1 murine EST derives from a clone isolated from 6.5/8.5d embryo, 1 murine EST derives from a clone isolated from liver, 1 murine EST derives from a clone isolated from 4-week male thymus, 1 murine EST derives from a clone isolated from diaphragm, and 1 murine, EST derives from a clone isolated from 11-week skin.

Tissue Distribution of NEOKINE-1 mRNA

[1275] This Example describes the tissue distribution of NEOKINE mRNA, as determined by Northern blot and in situ hybridization.

[1276] Northern blot hybridizations with the various RNA samples were performed under standard conditions and washed under stringent conditions, i.e., 0.2×SSC at 65° C. In each sample, the probe hybridized to a single RNA of about 1.9 kb. The results of hybridization of the probe to various mRNA samples are described below.

[1277] Expression in mouse embryos was examined using a developmental mouse Northern (Clontech) and in situ hybridization. This blot had poly(A)+ RNA isolated from whole embryos of age 7, 11, 15 and 17 days. The analysis using the mouse gene as a probe revealed intense expression of a unique 1.9 kb transcript in the 7 d sample, but this may be due to contaminating RNA from the placenta. In the remaining samples, expression was low at 11 d, highest on day 15, and then dropped again on day 17.

[1278] Expression in diverse human tissue was examined using tissue-specific Northern blots (Clontech). These blots had poly(A)+ RNA isolated from various disease-free human organs. The analysis using a PCR fragment of the human gene as a probe revealed strongest expression of a unique 1.9 kb transcript in the kidney and small intestine, followed by strong expression in the spleen, uterus and colon, and lower expression in thymus, prostate, stomach, thyroid, spinal cord, lymph node, trachea, adrenal gland, bone marrow, heart, brain placenta, liver, smooth muscle and pancreas. There was little/no expression in lung, peripheral blood leukocytes and testis. The size of the poly(A)+ transcript in both human and mouse (1.9 kb) is consistent with the length of the full-length cDNAs (1.56 kb) which lack the poly(A) tails.

[1279] In situ hybridization of a murine antisense probe to various embryonic, post-natal and adult tissues was performed as follows. 8 μm sagittal sections of fresh frozen embryonic day 14.5, 16.5 and postnatal day 1.5 B6 mice, as well as 8 μm sections of various adult B6 mouse tissues (listed below) were used for hybridization. Sections were postfixed with 4% formaldehyde in DEPC treated 1× phosphate-buffered saline at room temperature for 10 min before being rinsed twice in DEPC 1× phosphate-buffered saline and once in 0.1 M triethanolamine-HCl (pH 8.0). Following incubation in 0.25% acetic anhydride-0.1 M triethanolamine-HCl for 10 min, sections were rinsed in DEPC 2×SSC (1×SSC is 0.15M NaCl plus 0.015M sodium citrate). Tissue was dehydrated through a series of ethanol washes, incubated in 100% chloroform for 5 min, and then rinsed in 100% ethanol for 1 min and 95% ethanol for 1 min and allowed to air dry.

[1280] The hybridization was performed using a ³⁵S-radiolabeled cRNA (antisense) probe from the following DNA sequence,

(SEQ ID NO: 28)
GTCCAAGTGTAAGTGTTCCCGGAAGGGGCCCAAGATCCGCTACAGCGACG
TGAAGAAGCTGGAAATGAAGCCAAAGTACCCACACTGCGAGGAGAAGATG
GTTATCGTCACCACCAAGAGCATGTCCAGGTACCGGGGCCAGGAGCACTG
CCTGCACCCTAAGCTGCAGAGCACCAAACGCTTCATCAAGTGGTACAATG
CCTGGAACGAGAAGCGCAGGGTCTACGAAGAATAGGGTGGACGATCATGG
AAAGAAAAACTCCAGGCCAGTTGAGAGACTTCAGCAGAGGACTTTGCAGA
TTAAAATAAAAGCCCTTTCTTTCTCACAAGCATAAGACAAATTATATATT
GCTATGAAGCTCTTCTTACCAGGGTCAGTTTTTACATTTTATAGCTGTGT
GTGAAAGGCTTCCAGATGTGAGATCCAGCTCGCCTGCGCACCAGACTTCA
TTACAAGTGGCTTTTTGCTGGGCGGTTG.

[1281] A sense RNA probe made from the same DNA sequence was used to determine specificity of the antisense probe. Tissues were incubated with probes (approximately 5×10⁷ cpm/ml) in the presence of a solution containing 600 mM NaCl, 10 mM Tris (pH 7.5), 1 mM EDTA, 0.01% sheared salmon sperm DNA, 0.01% yeast tRNA, 0.05% yeast total RNA type X1, 1×Denhardt's solution, 50% formamide, 10% dextran sulfate, 100 mM dithiothreitol, 0.1% sodium dodecyl sulfate (SDS), and 0.1% sodium thiosulfate for 18 h at 55° C. After hybridization, slides were washed with 2×SSC. Sections were then sequentially incubated at 37° C. in TNE (a solution containing 10 mM Tris-HCl (pH 7.6), 500 mM NaCl, and 1 mM EDTA), for 10 min, in TNE with 10 μg of RNase A per ml for 30 min, and finally in TNE for 10 min. Slides were then rinsed with 2×SSC at room temp, washed with 2×SSC at 50° C. for 1 h, washed with 0.2×SSC at 55° C. for 1 h, and 0.2×SSC at 60° C. for 1 h. Sections were then dehydrated rapidly through serial ethanol-0.3 M sodium acetate concentrations before being air dried and exposed to Kodak Biomax MR scientific imaging film for 4 days at room temperature.

[1282] Following a 4 day film exposure, NEOKINE mRNA was detectable in the following tissues (Note: Tissues incubated with sense probe showed no signal in any tissues):

### Adult Mouse:

[1283] Brain—multifocal signal in the cortex
Purkinje cell layer of the cerebellum
areas of the hippocampus and forebrain
a small discrete region in the ventral portion of the hindbrain
low level ubiquitous signal in most other regions
eye—multifocal signal seen in harderian gland
anterior surface of lens/cornea
retina
descending colon—focal signal
transverse/ascending colon—multifocal signal
small Intestine—villi
kidney—cortical region
adrenal gland—medulla region and capsule
heart—multifocal signal
skeletal muscle—multifocal signal
lung—signal outlining the large airways
thymus—low signal
bladder—high signal from the transitional epithelium
placenta—signal seen in the outer membrane/cell layer

[1284] The following tissues were tested but no signal was detected in:

spleen
liver

### Postnatal Day 1.5 Mouse:

[1285] brain—specific regions, most notably the cortex
no ubiquitous expression as seen in adult
nasal turbinates
developing upper and lower teeth
trachea
uterus
sternebral cartilage
kidney—medulla and outermost cortex in a multifocal pattern
skin and hair follicles—very strong signal
intestine
note: no signal observed in lung

### Embryonic Day 16.5 Mouse:

[1286] brain—specific regions, most notably the cortex
no ubiquitous expression as seen in adult
spinal cord—low signal
esophagus
lung—signal from large airways
adrenal gland—cortical region (note: opposite of adult)
kidney—medulla and outermost cortex in a multifocal pattern
skin—very strong signal intestine

### Embryonic Day 14.5 Mouse:

[1287] brain—discrete regions, most notable a region in the hindbrain
lung—signal from large airways
skin—very strong signal especially from whisker pads and tip of nose and tail
umbilical cord
intestine

[1288] These results reveal a striking distribution of NEOKINE mRNA in various non-lymphoid organs. The fact that many normal tissues express abundant NEOKINE transcript suggests that these tissues make significant quantities of NEOKINE protein and that therefore the pro-inflammatory or chemoattractive activities of NEOKINE are very low or non-existent. Indeed, NEOKINE is expressed most significantly in highly immunoreactive tissues that are involved in barrier functions. This observation is consistent with a proposed role of NEOKINE as a suppressor of inflammation. Furthermore, the predicted amino terminus of mature NEOKINE lies just two residues from the first cysteine. In an analogous situation, an artificially truncated form of human IL-8 with only one residue before the first cysteine instead of the normal 6 residues converts the protein from an agonist to an antagonist of its cognate receptor. These observations are further consistent with the proposed anti-inflammatory activity being mediated by antagonizing the action of other pro-inflammatory chemokines. The general divergence of NEOKINE from other alpha chemokines while being highly conserved itself, and the presence of the extra 5 residues betwen the second pair of cysteines could also be consistent with a broad antagonist function on a diverse set of chemokine receptors. The strong expression in the skin, the kidney, the bronchii and the brain indicates that NEOKINES have utility in treating inflammation of these organs, such as occurs in acute renal failure, transplantation, allergy and infection. Furthermore, since the human AIDS virus HIV uses some chemokine receptors as co-receptors for infection, NEOKINES may also have utility in slowing or blocking infection by HIV.

### Example 27

### Isolation And Characterization of Rat and Macaque NEOKINE-1 cDNAs

[1289] During routine tests for sequences similar to mouse or human NEOKINE cDNA, one EST deriving from a rat brain cDNA and three ESTs deriving from macaque brain cDNAs were identified in a database of proprietary sequences. The database derives, at least in part, from sequencing of various mammalian clones generated from cDNA libraries created according to routine procedures. The cDNAs originated from rat brain and macaque brain libraries, respectively.

[1290] The nucleotide sequence encoding the at least 78 amino acid residues of the rat NEOKINE-1 protein (corresponding to the predicted mature protein) is set forth as SEQ ID NO:121. The amino acid sequence for mature rat NEOKINE-1 is set forth as SEQ ID NO:122. The coding portion (open reading frame) of SEQ ID NO:121 is set forth as SEQ ID NO:123. The nucleotide sequence and predicted amino acid sequence of macaque NEOKINE-1 are set forth as SEQ ID NO:124 and SEQ ID NO:135, respectively.

[1291] Examination of the cDNA sequence depicted in SEQ ID NO:121 shows that rat NEOKINE-1 comprises four cysteine residues which are conserved among all NEOKINE-1 family members identified thus far. Structural analysis of these proteins indicates that these cysteines are capable of forming 2 disulfide bridges. FIG. 8 depicts the alignment between the four NEOKINE-1 amino acid sequences identified according to these Examples.

### Example 28

### Secretion of NEOKINE Chemokines

[1292] Expression constructs for RGSHis6 epitope-tagged (C-terminus) human NEOKINE were transfected into 293T cells using lipofectamine (GIBCO/BRL) according to the manufacturers instructions. After culturing in appropriate medium for 48-72 hours, conditioned medium was harvested, spun, filtered, and passed over nickel metal chelating column (Qiagen). After washing, bound material was eluted 200 mM imidazole buffer and fractions collected. Peak fractions were analyzed by SDS-PAGE and western blot using anti His6 antibodies (Quiagen). Purified NEOKINE protein bound to PVDF membrane after SDS-PAGE and electroblotting was sequenced for N-terminal amino acid analysis using Edman-based chemistry protein sequencing. The amino acid residues were analyzed by HPLC and determined by separation and peak height as compared to standards.

[1293] The N-terminal sequence of band NEOKINE was found to be SKCKCSRKGP which corresponds exactly to the predicted signal peptide cleavage site (between Gly22 and Ser23). Because the same band is identified by anti-His6 antibodies, which recognize the C-terminal epitope tag, the band was identified as the full length, mature NEOKINE protein.

### Example 29

### Binding of NEOKINE to the NEOKINE Receptor (e.R., RDC1)

[1294] T112 (NEOKINE) was radioiodinated with lactoperoxidase according to standard protocols. RDC-1 in vector Pcdna3.1 was transiently transfected into 293 cells using calcium phosphate precipitation methodology. 72 hours after transfection, cells were harvested and binding assays performed under standard binding conditions for chemokines (e.g., low salt binding, high salt wash, binding at 24° C., 1 hour). Cells were then pelleted, washed, and radioactivity was counted. Binding was demonstrated and was determined to be high affinity by competition with unlabelled T112. The cpm bound in cell pellets in indicated below.

| | | | |
|---|---|---|---|
| 125_{I-T112} | 0.1 nm | 37613.0 cpm | 27014.0 cpm |
| T112 | 3.0 nm | 8343.0 cpm | 9229.0 cpm |

### Example 30

### Isolation and Characterization of Human T129 cDNAs

[1295] Human mesangial cells (Clonetics Corporation; San Diego, Calif.) were expanded in culture with Mesangial Cell Growth Media (Clonetics) according to the recommendations of the supplier. When the cells reached 80-90% confluence, they were stimulated with tumor necrosis factor (TNF; 10 ng/ml) and cycloheximide (CHI; 40 micrograms/ml) for 4 hours. Total RNA was isolated using the RNeasy Midi Kit (Qiagen; Chatsworth, Calif.), and the poly A+ fraction was further purified using Oligotex beads (Qiagen).

[1296] Three micrograms of poly A+ RNA were used to synthesize a cDNA library using the Superscript cDNA Synthesis kit (Gibco BRL; Gaithersburg, Md.). Complementary DNA was directionally cloned into the expression plasmid pMET7 using the SalI and NotI sites in the polylinker to construct a plasmid library. Transformants were picked and grown up for single-pass sequencing.

[1297] One clone, jthKb042d12, showed limited homology to OX40 (Latza et al. (1994) Eur. J. Immunol. 24:677), a member of the TNF receptor superfamily, and was sequenced further. Complete sequencing of the clone revealed an approximately 2.5 kb cDNA insert with a 1290 base pair open reading frame predicted to encode a novel 430 amino transmembrane protein.

### Example 31

### Distribution of T129 mRNA in Human Tissues

[1298] The expression of T129 was analyzed using Northern blot hybridization. A 567 bp portion of T129 cDNA encoding the amino terminus of T129 protein was generated by PCR. The DNA was radioactively labeled with ³²P-dCTP using the Prime-It kit (Stratagene; La Jolla, Calif.) according to the instructions of the supplier. Filters containing human mRNA (MTNI and MTNII: Clontech; Palo Alto, Calif.) were probed in ExpressHyb hybridization solution (Clontech) and washed at high stringency according to manufacturer's recommendations.

[1299] These studies revealed that T129 is expressed as an approximately 3.0 kilobase transcript at moderate levels in peripheral blood leukocytes, spleen, and skeletal muscle. Lower levels of transcript were seen in heart, brain and placenta. In addition, a hybridization signal was seen in peripheral blood leukocytes at >15 kb.

### Example 32

### Characterization of T129 Proteins

[1300] In this example, the predicted amino acid sequence of human T129 protein was compared to amino acid sequences of known proteins and various motifs were identified. In addition, the molecular weight of the human T129 proteins was predicted.

[1301] The human T129 cDNA isolated as described above (SEQ ID NO:137) encodes a 430 amino acid protein (SEQ ID NO:138). The signal peptide prediction program SIGNALP Optimized Tool (Nielsen et al. (1997) Protein Engineering 10:1-6) predicted that T129 includes a 22 amino acid signal peptide (amino acid 1 to about amino acid 22 of SEQ ID NO:137) preceding the 408 mature protein (about amino acid 23 to amino acid 430; SEQ ID NO:140). T129 also include one predicted transmembrane domain (amino acids 163-186 of SEQ ID NO:138). A hydropathy plot of T129 is presented in FIG. 9. This plot shows the two predicted TM domains as well as a extracellular region (labelled “OUT”; amino acids 31 to 162 of SEQ ID NO:138) and a cytoplasmic region (labelled “IN”; amino acids 187 to 430 of SEQ ID NO:138) as well as the location of cysteines (“cys”; short vertical lines just below plot) and the TNFR/NGFR cysteine-rich domain indicated by its PFAM identifier (PF0020; bar just above plot). For general information regarding PFAM identifiers refer to Sonnhammer et al. (1997) Protein 28:405-420.

[1302] T129 has a region (amino acids 51-90; SEQ ID NO:142) of homology to a TNFR/NGFR cysteine-rich domain consensus derived from a hidden Markov model (SEQ ID NO:141). The TNFR/NGFR cysteine-rich domain of T129 does not include all the conserved cysteines usually present in such domains (4 of 6). Moreover, unlike other members of the TNF superfamily, T129 includes only one such domain; most TNF family members include two to four such cysteine rich domains.

[1303] Mature T129 has a predicted MW of 43.5 kDa (46 kDa for immature T129), not including post-translational modifications.

### Example 33

### Preparation of T129 Proteins

[1304] Recombinant T129 can be produced in a variety of expression systems. For example, the mature T129 peptide can be expressed as a recombinant glutathione-S-transferase (GST) fusion protein in E. coli and the fusion protein can be isolated and characterized. Specifically, as described above, T129 can be fused to GST and this fusion protein can be expressed in E. coli strain PEB199. Expression of the GST-T129 fusion protein in PEB 199 can be induced with IPTG. The recombinant fusion protein can be purified from crude bacterial lysates of the induced PEB 199 strain by affinity chromatography on glutathione beads.

### Deposit of Microorganisms

[1305] A nucleic acid encoding a full-length human Delta protein is contained in a plasmid which was deposited with the American Type Culture Collection, 10801 University Boulevard, Manassas, Va. 20110-2209 (ATCC®) on Mar. 5, 1997 and has been assigned ATCC® accession number 98348.

[1306] A clone containing the cDNA molecule encoding human A259, (clone Human 12) was deposited with the American Type Culture Collection, 10801 University Boulevard, Manassas, Va., 20110-2209, on Apr. 2, 1999 as Accession Number 207190, as a single deposit.

[1307] A clone containing the cDNA molecule encoding mouse A259, (clone Mouse 12) was deposited with the American Type Culture Collection, 10801 University Boulevard, Manassas, Va., 20110-2209, on Apr. 2, 1999 as Accession Number 207191, as a single deposit.

### EQUIVALENTS

[1308] Those skilled in the art will recognize, or be able to ascertain using no more than routine experimentation, many equivalents of the specific embodiments of the invention described herein. Such equivalents are intended to be encompassed by the following claims.

[1309] All publications, patents and patent applications mentioned in this specification are herein incorporated by reference into the specification to the same extent as if each individual publication, patent or patent application was specifically and individually indicated to be incorporated herein by reference.

The application's sequence listing, which the Patent Office published only in electronic form, follows.

SEQUENCE LISTING (206 sequences)

SEQ ID NO: 1 - DNA, 2800 bp, Homo sapiens
  CDS (338)..(2395)
gtcgacccacgcgtccggctgcgcgcaggccgggaacacgaggccaagagccgcagccccagccgccttggtgcagcgtacaccggcactagcccgcttgcagccccaggattagacagaagacgcgtcctcggcgcggtcgccgcccagccgtagtcacctggattacctacagcggcagctgcagcggagccagcgagaaggccaaaggggagcagcgtcccgagaggagcgcctcttttcagggaccccgccggctggcggacgcgcgggaaagcggcgtcgcgaacagagccagattgagggcccgcgggtggagagagcgacgcccgaggggatggcggcagcgtcccggagcgcctctggctgggcgctactgctgctggtggcactttggcagcagcgcgcggccggctccggcgtcttccagctgcagctgcaggagttcatcaacgagcgcggcgtactggccagtgggcggccttgcgagcccggctgccggactttcttccgcgtctgccttaagcacttccaggcggtcgtctcgcccggaccctgcaccttcgggaccgtctccacgccggtattgggcaccaactccttcgctgtccgggacgacagtagcggcggggggcgcaaccctctccaactgcccttcaatttcacctggccgggtaccttctcgctcatcatcgaagcttggcacgcgccaggagacgacctgcggccagaggccttgccaccagatgcactcatcagcaagatcgccatccagggctccctagctgtgggtcagaactggttattggatgagcaaaccagcaccctcacaaggctgcgctactcttaccgggtcatctgcagtgacaactactatggagacaactgctcccgcctgtgcaagaagcgcaatgaccacttcggccactatgtgtgccagccagatggcaacttgtcctgcctgcccggttggactggggaatattgccaacagcctatctgtctttcgggctgtcatgaacagaatggctactgcagcaagccagcagagtgcctctgccgcccaggctggcagggccggctgtgtaacgaatgcatcccccacaatggctgtcgccacggcacctgcagcactccctggcaatgtacttgtgatgagggctggggaggcctgttttgtgaccaagatctcaactactgcacccaccactccccatgcaagaatggggcaacgtgctccaacagtgggcagcgaagctacacctgcacctgtcgcccaggctacactggtgtggactgtgagctggagctcagcgagtgtgacagcaacccctgtcgcaatggaggcagctgtaaggaccaggaggatggctaccactgcctgtgtcctccgggctactatggcctgcattgtgaacacagcaccttgagctgcgccgactccccctgcttcaatgggggctcctgccgggagcgcaaccagggggccaactatgcttgtgaatgtccccccaacttcaccggctccaactgcgagaagaaagtggacaggtgcaccagcaacccctgtgccaacgggggacagtgcctgaaccgaggtccaagccgcatgtgccgctgccgtcctggattcacgggcacctactgtgaactccacgtcagcgactgtgcccgtaacccttgcgcccacggtggcacttgccatgacctggagaatgggctcatgtgcacctgccctgccggcttctctggccgacgctgtgaggtgcggacatccatcgatgcctgtgcctcgagtccctgcttcaacagggccacctgctacaccgacctctccacagacacctttgtgtgcaactgcccttatggctttgtgggcagccgctgcgagttccccgtgggcttgccgcccagcttcccctgggtggccgtctcgctgggtgtggggctggcagtgctgctggtactgctgggcatggtggcagtggctgtgcggcagctgcggcttcgacggccggacgacggcagcagggaagccatgaacaacttgtcggacttccagaaggacaacctgattcctgccgcccagcttaaaaacacaaaccagaagaaggagctggaagtggactgtggcctggacaagtccaactgtggcaaacagcaaaaccacacattggactataatctggccccagggcccctggggcgggggaccatgccaggaaagtttccccacagtgacaagagcttaggagagaaggcgccactgcggttacacagtgaaaagccagagtgtcggatatcagcgatgtgctcccccagggactccatgtaccagtctgtgtgtttgatatcagaggagaggaatgaatgtgtcattgccacggaggtataaggcaggagcctacctggacatccctgctcagccccgcggctggaccttccttctgcattgtttacattgcatcctggatgggacgtttttcatatgcaacgtgctgctctcaggaggaggagggaatggcaggaaccggacagactgtgaacttgccaagagatgcaatacccttccacacctttgggtgtctgtctggcatcagattggcagctgcaccaaccagaggaacagaagagaagagagtggcagtagccccatggggcccggagctgctgtggcctccactggcatccgtgtttccaaaagtgcctttggcccagccaagggtgccaggcctaactggggcactcagggcagtgtgttggaaattccactgagggggaaatcaggtgctgcggccgc

SEQ ID NO: 2 - protein, 685 aa, Homo sapiens
MAAASRSASGWALLLLVALWQQRAAGSGVFQLQLQEFINERGVLASGRPCEPGCRTFFRVCLKHFQAVVSPGPCTFGTVSTPVLGTNSFAVRDDSSGGGRNPLQLPFNFTWPGTFSLIIEAWHAPGDDLRPEALPPDALISKIAIQGSLAVGQNWLLDEQTSTLTRLRYSYRVICSDNYYGDNCSRLCKKRNDHFGHYVCQPDGNLSCLPGWTGEYCQQPICLSGCHEQNGYCSKPAECLCRPGWQGRLCNECIPHNGCRHGTCSTPWQCTCDEGWGGLFCDQDLNYCTHHSPCKNGATCSNSGQRSYTCTCRPGYTGVDCELELSECDSNPCRNGGSCKDQEDGYHCLCPPGYYGLHCEHSTLSCADSPCFNGGSCRERNQGANYACECPPNFTGSNCEKKVDRCTSNPCANGGQCLNRGPSRMCRCRPGFTGTYCELHVSDCARNPCAHGGTCHDLENGLMCTCPAGFSGRRCEVRTSIDACASSPCFNRATCYTDLSTDTFVCNCPYGFVGSRCEFPVGLPPSFPWVAVSLGVGLAVLLVLLGMVAVAVRQLRLRRPDDGSREAMNNLSDFQKDNLIPAAQLKNTNQKKELEVDCGLDKSNCGKQQNHTLDYNLAPGPLGRGTMPGKFPHSDKSLGEKAPLRLHSEKPECRISAMCSPRDSMYQSVCLISEERNECVIATEV

SEQ ID NO: 3 - DNA, 2055 bp, Homo Sapiens
atggcggcagcgtcccggagcgcctctggctgggcgctactgctgctggtggcactttggcagcagcgcgcggccggctccggcgtcttccagctgcagctgcaggagttcatcaacgagcgcggcgtactggccagtgggcggccttgcgagcccggctgccggactttcttccgcgtctgccttaagcacttccaggcggtcgtctcgcccggaccctgcaccttcgggaccgtctccacgccggtattgggcaccaactccttcgctgtccgggacgacagtagcggcggggggcgcaaccctctccaactgcccttcaatttcacctggccgggtaccttctcgctcatcatcgaagcttggcacgcgccaggagacgacctgcggccagaggccttgccaccagatgcactcatcagcaagatcgccatccagggctccctagctgtgggtcagaactggttattggatgagcaaaccagcaccctcacaaggctgcgctactcttaccgggtcatctgcagtgacaactactatggagacaactgctcccgcctgtgcaagaagcgcaatgaccacttcggccactatgtgtgccagccagatggcaacttgtcctgcctgcccggttggactggggaatattgccaacagcctatctgtctttcgggctgtcatgaacagaatggctactgcagcaagccagcagagtgcctctgccgcccaggctggcagggccggctgtgtaacgaatgcatcccccacaatggctgtcgccacggcacctgcagcactccctggcaatgtacttgtgatgagggctggggaggcctgttttgtgaccaagatctcaactactgcacccaccactccccatgcaagaatggggcaacgtgctccaacagtgggcagcgaagctacacctgcacctgtcgcccaggctacactggtgtggactgtgagctggagctcagcgagtgtgacagcaacccctgtcgcaatggaggcagctgtaaggaccaggaggatggctaccactgcctgtgtcctccgggctactatggcctgcattgtgaacacagcaccttgagctgcgccgactccccctgcttcaatgggggctcctgccgggagcgcaaccagggggccaactatgcttgtgaatgtccccccaacttcaccggctccaactgcgagaagaaagtggacaggtgcaccagcaacccctgtgccaacgggggacagtgcctgaaccgaggtccaagccgcatgtgccgctgccgtcctggattcacgggcacctactgtgaactccacgtcagcgactgtgcccgtaacccttgcgcccacggtggcacttgccatgacctggagaatgggctcatgtgcacctgccctgccggcttctctggccgacgctgtgaggtgcggacatccatcgatgcctgtgcctcgagtccctgcttcaacagggccacctgctacaccgacctctccacagacacctttgtgtgcaactgcccttatggctttgtgggcagccgctgcgagttccccgtgggcttgccgcccagcttcccctgggtggccgtctcgctgggtgtggggctggcagtgctgctggtactgctgggcatggtggcagtggctgtgcggcagctgcggcttcgacggccggacgacggcagcagggaagccatgaacaacttgtcggacttccagaaggacaacctgattcctgccgcccagcttaaaaacacaaaccagaagaaggagctggaagtggactgtggcctggacaagtccaactgtggcaaacagcaaaaccacacattggactataatctggccccagggcccctggggcgggggaccatgccaggaaagtttccccacagtgacaagagcttaggagagaaggcgccactgcggttacacagtgaaaagccagagtgtcggatatcagcgatgtgctcccccagggactccatgtaccagtctgtgtgtttgatatcagaggagaggaatgaatgtgtcattgccacggaggta

SEQ ID NO: 4 - protein, 720 aa, Mus Musculus
MGRRSALALAVVSALLCQVWSSGVFELKLQEFVNKKGLLGNRNCCRGGSGPPCACRTFFRVCLKHQASVSPEPPCTYGSAVTPVLGVDSFSLPDGAGIDPAFSNPIRFPFGFTWPGTFSLIIEALHTDSPDDLATENPERLISRLTTQRHTVGEEWSQDLHSSGRTDLRYSYRFVCDEHYYGEGCSVFCRPRDDAFGHFTCGDRGEKMCDPGWKGQYCTDPICLPGCDDQHGYCDKPGECKCRVGWQGRYCDECIRYPGCLHGTCQQPWQCNCQEGWGGLFCNQDLNYCTHHKPCRNGATCTNTGQGSYTCSCRPGYTGANCELEVDECAPSPCKNGASCTDLEDSFSCTCPPGFYGKVCELSAMTCADGPCFNGGRCSDNPDGGYTCHCPLGFSGFNCEKKMDLCGSSPCSNGAKCVDLGNSYLCRCQAGFSGRYCEDNVDDCASSPCANGGTCRDSVNDFSCTCPPGYTGKNCSAPVSRCEHAPCHNGATCHQRGQRYMCECAQGYGGPNCQFLLPEPPPGPMVVDLSERHMESQGGPFPWVAVCAGVVLVLLLLLGCAAVVVCVRLKLQKHQPPPEPCGGETETMNNLANCQREKDVSVSIIGATQIKNTNKKADFHGDHGAKKSSFKVRYPTVDYNLVRDLKGDEATVRDTHSKRDTKCQSQSSAGEEKIAPTLRGGEIPDRKRPESVYSTSKDTKYQSVYVLSAEKDECVIATEV

SEQ ID NO: 5 - protein, 713 aa, Rattus Norvegicus
MGRRSALALAVVSALLCQVWSSGVFELKLQEFVNKKGLLGNRNCCRGGSGPPCACRTFFRVCLKHYQASVSPEPPCTYGSAVTAVLGVDSFSLPDGAGIDPAFSNPIRFPFGFTWPGTFSLIIEALHTDSPDDLATENPERLISRLTTQRHTVGEEWSQDLHSSGRTDLRYSYRFVCDEHYYGEGCSVFCRPRDDAFGHFTCGERGEKMCDPGWKGQYCTDPICLPGCDDQHGYCDKPGECKCRVGWQGRYCDECIRYPGCLHGTCQQPWQCNCQEGWGGLFCNQDLNYCTHHKPCRNGATCTNTGQGSYTCSCRPGYTGANCELEVDECAPSPCKNGGSCTDLEDSYSCTCPPGFYGKVCELSAMTCADGPCFNGGRCSDNPDGGYTCHCPAGFSGFNCEKKIDLCSSSPCSNGAKCVDLGNSYLCRCQTGFSGRYCEDNVDDCASSPCANGGTCRDSVNDFSCTCPPGYTGKNCSAPVSRCEHAPCHNGATCHQRGQRYMCECAQGYGGANCQFLLPEPPPDLIVAAQGGSFPWVAVCAGVVLVLLLLLGCAAVVVCVRLKLQKHQPPPDPCGGETETMNNLANCQREKDVSVSIIGATQIKNTNKKADFHGDHGADKSSFKARYPTVDYNLIRDLKGDEATVRDAHSKRDTKCQSQGSAGEEKSTSTLRGGEVPDRKRPESVYSTSKDTKYQSVYVLSAEKDECVIATEV

SEQ ID NO: 6 - protein, 157 aa, Homo Sapiens
ENSYSCTCPPGFYGKICELSAMTCADGPCFNGGRCSDSPDGGYSCRCPVCYSGFNCEKKIDYCSSSPCSNGAKCVDLGDAYLCRCQAGFSCRHCDDNVDDCASSPCANGGTCRDGVNDFSCTCPPGYTGRNCSAPASRCEHAPCHNGATCHERGHRY

SEQ ID NO: 7 - protein, 721 aa, Xenopus Laevis
MGQQRMLTLLVLSAVLCQISCSGLFELRLQEFVNKKGLLGNMNCCRPGSLASLQRCECKTFFRICLKHYQSNVSPEPPCTYGGAVTPVLGTNSFVVPESSNADPTFSNPIRFPFGFTWPGTFSLIIEAIHADSADDLNTENPERLISRLATQRHLTVGEQWSQDLHSSDRTELKYSYRFVCDEYYYGEGCSDYCRPRDDAFGHFSCGEKGENLCNPGWKGLYCTEPICLPGCDEHHGYCDKPGECKCRVGWQGRYCDECIRYPGCLHGTCQQPWQCNCQEGWGGLFCNQDLNYCTHHKPCENGATCTNTGQGSYTCSCRPGYTGSNCEIEVNECDANPCKNGGSCSDLENSYTCSCPPGFYGKNCELSAMTCADGPCFNGGRCADNPDGGYICPCPVGYSGFNCEKKIDYCSSNPCANGARCEDLGNSYICQCQEGFSGRNCDDNLDDCTSFPCQNGGTCQDGINDYSCTCPPGYIGKNCSMPITKCEHNPCHNGATCHERNNRYVCQCARGYGGNNCQFLLPEEKPVVVDLTEKYTEGQSGQFPWIAVCAGIVLVLMLLLGCAAVVVCVRVRVQKRRHQPEACRGESKTMNNLANCQREKDISVSFIGTTQIKNTNKKIDFLSESNNEKNGYKPRYPSVDYNLVHELKNEDSPKEERSKCEAKCSSNDSDSEDVNSVHSKRDSSERRRPDSAYSTSKDTKYQSVYVISDEKDECIIATEV

SEQ ID NO: 8 - protein, 729 aa, Gallus Gallus
MGGRFLLTLALLSALLCRCQVDGSGVFELKLQEFVNKKGLLSNRNCCRGGGPGGAGQQQCDCKTFFRVCLKHYQASVSPEPPCTYGSAITPVLGANSFSVPDGAGGADPAFSNPIRFPFGFTWPGTFSLIIEALHTDSPDDLTTENPERLISRLATQRHLAVGEEWSQDLHSSGRTDLKYSYRFVCDEHYYGEGCSVFCRPRDDRFGHFTCGERGEKVCNPGWKGQYCTEPICLPGCDEQHGFCDKPGECKCRVGWQGRYCDECIRYPGCLHGTCQQPWQCNCQEGWGGLFCNQDLNYCTHHKPCKNGATCTNTGQGSYTCSCRPGYTGSSCEIEINECDANPCKNGGSCTDLENSYSCTCPPGFYGKNCELSAMTCADGPCFNGGRCTDNPDGGYSCRCPLGYSGFNCEKKIDYCSSSPCANGAQACVDLGNSYICQCQAGFTGRHCDDNVDDCASFPCVNGGTCQDGVNDYSCTCPPGYNGKNCSTPVSRCEHNPCHNGATCHERSNRYVCECARGYGGLNCQFLLPEPPQGPVIVDFTEKYTEGQNSQFPWIAVCAGIILVLMLLLGCAAIVVCVRLKVQKRHHQPEACRSETETMNNLANCQREKDISISVIGATQIKNTNKKVDFHSDNSDKNGYKVRYPSVDYNLVHELKNEDSVKEEHGKCEAKCETYDSEAEEKSAVQLKSSDTSERKRPDSVYSTSKDTKYQSVYVISEEKDECIIATEV

SEQ ID NO: 9 - protein, 717 aa, Danio Rerio
MGRLMIAVLLCVMISQGFCSGVFELKLQEFLNKKGVTGNANCCKGSAAEGHQCECKTFFRICLKHYQANVSPDPPCTYGGAVTPVLGSNSFQVPESFPDSSFTNPIPFAFGFTWPGTFSLIIEALHTDSTDDLSTENPDRLISRMTTQRHLTVGEEWSQDLQVGGRTELKYSYRFVCDEHYYGEGCSVFCRPRDDTFGHFTCGERGEIICNSGWKGQYCTEPICLPGCDEDHGFCDKPGECKCRVGFSGKYCDDCIRYPGCLHGTCQQPWQCNCQEGWGGLFCNQDLNYCTHHKPCQNGATCTNTGQGSYTCSCRPGFTGDSCEIEVNECSGSPCRNGGSCTDLENTYSCTCPPGFYGRNCELSAMTCADGPCFNGGHCADNPEGGYFCQCPMGYAGFNCEKKIDHCSSNPCSNDAQCLDLVDSYLCQCPEGFTGTHCEDNIDECATYPCQNGGTCQDGLSDYTCTCPPGYTGKNCTSAVNKCLHNPCHNGATCHEMDNRYVCACIPGYGGRNCQFLLPENPQGQAIVEGADKRYSYEEDDGGFPWTAVCAGIILVLLVLIGGSVFVIYIRLKLQQRSQQIDSHSEIETMNNLTNNRSREKDLSVSIIGATQVKNINKKVDFQSDGDKNGFKSRYSLVDYNLVHELKQEDLGKEDSERSEATKCEPLDSDSEEKHRNHLKSDSSERKRTESLCKDTKYQSVFVLSEEKDECIIATEV

SEQ ID NO: 10 - protein, 642 aa, Xenopus Laevis
MASPLLLVYVAATLCLPLVYPAGVFELKIHSFSTPRPACAAGKSCNIFFRVCLKHAQPVVSPDPPCTFGSAVSDILPSDSKAITDSSPIRVPFHFKWPGIFSLIIESWTTNSAEQSTENPDNLLSRLATRRRLSIGEDWSQDIHLGQQSELRYSYHVSCDEHYYGDSCSDYCRPRDDNFGHYTCDEQGNRLCMSGWKGEYCAEPICLPGCSESHGFCELPGECKCRMGWQGELCDECLRYPGCQHGSCSQPWECICQEGWGGLFCNQDLNYCTNHQPCRNGASCINIGQGSYSCSCRAGFTGTNCEIDINECASNPCKNGGSCNDLENDYECVCPRGFYGKNCDISAMTCEDGPCFNGGTCIEKSSGVGYVCRCPPNYHGSNCEKKIDRCTNSPCLNGGQCLDMGRNVLCKCRPGPSGPRCELNIDDCASSPCANGGTCVDAVNSYTCSCTLGYGGKDCTLRVDACSSKPCKNGGTCYTKFTGNVCQCPTGFMGTSCEFRVHDPTPASHRADSSNTLTMVVCLGLLTFFLLGCGVFMVMRGMRRGHFNEKGRVNNDLEPKNNLIEKEPHFKMPNPDYLREKSSSKQKLLQGSESEEERSGRRTDRKPDTKQCNPTSRYPEDGAYHPIYILPEPEQCIFATEV

SEQ ID NO: 11 - protein, 830 aa, Drosophila Melanogaster
MHWIKCLLTAFICFTVIVQVHSSGSFELRLKYFSNDHGRDNEGRCCSGESDGATGKCLGSCKTRFRVCLKHYQATIDTTSQCTYGDVITPILGENSVNLTDAQRFQNKGFTNPIQFPFSFSWPGTFSLIVEAWHDTNNSGNARTNKLLIQRLLVQQVLEVSSEWKTNKSESQYTSLEYDFRVTCDLNYYGSGCAKFCRPRDDSFGHSTCSETGEIICLTGWQGDYCHIPKCAKGCEHGHCDKPNQCVCQLGWKGALCNECVLEPNCIHGTCNKPWTCICNEGWGGLYCNQDLNYCTNHRPCKNGGTCFNTGEGLYTCKCAPGYSGDDENEIYSCDADVNPCQNGGTCIDEPHTKTGKCHCANGWSGKMCEEKVLTCSDKPCHQGICRNVRPGLGSKGQGYQCECPIGYSGPNCDLQLDNCSPNPCINGGSCQPSGKCICPAGFSGTRCETNIDDCLGHQCENGGTCIDMVNQYRCQCVPGFHGTHCSSKVDLCLIRPCANGGTCLNLNNDYQCTCRAGFTGKDCSVDIDECSSGPCHNGGTCMNRVNSFECVCANGFRGKQCDEESYDSVTFDAHQYGATTQARADGLTNAQVVLIAVFSVAMPLVAVIAACVVFCMKRKRKRAQEKDDAEARKQNEQNAVATMHHNGSGVGVALASASLGGKTGSNSGLTFDGGNPNIIKNTWDKSVNNICASAAAAAAAAAAADECLMYGGYVASVADNNNANSDFCVAPLQRAKSQKQLNTDPTLMHRGSPAGSSAKGASGGGPGAAEGKRISVLGEGSYCSQRWPSLAAAGVAGACSSQLMAAASAAGTDGTAQQQRSVVCGTPHM

SEQ ID NO: 12 - DNA, 20 bp, Homo Sapiens
agcgcctctggctgggcgct

SEQ ID NO: 13 - DNA, 20 bp, Homo Sapiens
cggccagaggccttgccacc

SEQ ID NO: 14 - DNA, 20 bp, Homo Sapiens
ttgcgctcccggctggagcc

SEQ ID NO: 15 - DNA, 20 bp, Homo Sapiens
atgcggcttggacctcggtt

SEQ ID NO: 16 - DNA, 21 bp, Homo Sapiens
tgccgccatccctcggggcgt

SEQ ID NO: 17 - DNA, 20 bp, Homo Sapiens
ggacgctgccgccatcccct

SEQ ID NO: 18 - DNA, 28 bp, Homo Sapiens
ggacgctgccgccatcccctcggggcgt

SEQ ID NO: 19 - DNA, 20 bp, Homo Sapiens
tcaatctggctctgttcgcg

SEQ ID NO: 20 - DNA, 26 bp, Homo Sapiens
cgctctctccacccgcgggccctcaa

SEQ ID NO: 21 - DNA, 171 bp, Homo Sapiens
  misc_feature (1)..(171): n = A,T,C or G
gcccaggcngaccctggtgtggactgtgagctggagctcagcgagtgtgacagcaacccctgtcgcantggaggcagctgtaaggaccangaggatggctaccactgcctgtgtcctccgggctactacggcntgcatcgtgaacacngcacctcttagctgngccgactc

SEQ ID NO: 22 - DNA, 20 bp, Homo Sapiens
ctcttctgttcctctggttg

SEQ ID NO: 23 - protein, 45 aa, Artificial Sequence
  DSL domain consensus sequence
  VARIANT (1)..(2): Xaa = any amino acid
  VARIANT (4)..(6): Xaa = any amino acid
  VARIANT (8)..(8): Xaa = Phe or Tyr
  VARIANT (10)..(11): Xaa = any amino acid
  VARIANT (13)..(15): Xaa = any amino acid
  VARIANT (17)..(17): Xaa = His or Arg
  VARIANT (18)..(18): Xaa = any amino acid
  VARIANT (20)..(20): Xaa = any amino acid
  VARIANT (22)..(22): Xaa = any amino acid
  VARIANT (25)..(25): Xaa = His or Arg
  VARIANT (26)..(27): Xaa = any amino acid
  VARIANT (29)..(31): Xaa = any amino acid
  VARIANT (33)..(35): Xaa = any amino acid
  VARIANT (37)..(38): Xaa = any amino acid
  VARIANT (41)..(41): Xaa = any amino acid
  VARIANT (43)..(43): Xaa = any amino acid
XXCXXXYXGXXCXXXCXXRXDXFGXXXCXXXGXXXCXXGWXGXYC

SEQ ID NO: 24 - DNA, 3133 bp, Mus Musculus
  CDS (39)..(2099)
gtcgacccacgcgtccggtggagaggacaccccaagggatgacgcctgcgtcccggagcgcctgtcgctgggcgctactgctgctggcggtactgtggccgcagcagcgcgctgcgggctccggcatcttccagctgcggctgcaggagttcgtcaaccagcgcggtatgctggccaatgggcagtcctgcgaaccgggctgccggactttcttccgcatctgccttaagcacttccaggcaaccttctccgagggaccctgcacctttggcaatgtctccacgccggtattgggcaccaactccttcgtcgtcagggacaagaatagcggcagtggtcgcaaccctctgcagttgcccttcaatttcacctggccgggaaccttctcactcaacatccaagcttggcacacaccgggagacgacctgcggccagagacttcgccaggaaactctctcatcagccaaatcatcatccaaggctctcttgctgtgggtaagatttggcgaacagacgagcaaaatgacaccctcaccagactgagctactcttaccgggtcatctgcagtgacaactactatggagagagctgttctcgcctatgcaagaagcgcgatgaccacttcggacattatgagtgccagccagatggcagcctgtcctgcctgccgggctggactgggaagtactgtgaccagcctatatgtctttctggctgtcatgagcagaatggttactgcagcaagccagatgagtgcatctgccgtccaggttggcagggtcgcctgtgcaatgaatgtatcccccacaatggctgtcgtcatggcacctgcagcatcccctggcagtgtgcctgcgatgagggatggggaggtctgttttgtgaccaagatctcaactactgtactcaccactctccgtgcaagaatggatcaacgtgttccaacagtgggccaaagggttatacctgcacctgtctcccaggctacactggtgagcactgtgagctgggactcagcaagtgtgccagcaacccctgtcgaaatggtggcagctgtaaggaccaggagaatagctaccactgcctgtgtcccccaggctactatggccagcactgtgagcatagtaccttgacctgcgcggactcaccctgcttcaatgggggctcttgccgggagcgcaaccaggggtccagttatgcctgcgaatgcccccccaactttaccggctctaactgtgagaagaaagtagacaggtgtaccagcaacccgtgtgccaatggaggccagtgccagaacagaggtccaagccgaacctgccgctgccggcctggattcacaggcacccactgtgaactgcacatcagcgattgtgcccgaagtccctgtgcccacgggggcacttgccacgatctggagaatgggcctgtgtgcacctgccccgctggcttctctggaaggcgctgcgaggtgcggataacccacgatgcctgtgcctccggaccctgcttcaatggggccacctgctacactggcctctccccaaacaacttcgtctgcaactgtccttatggctttgtgggcagccgctgcgagtttcccgtgggcttgccacccagcttcccctgggtagctgtctcgctgggcgtggggctagtggtactgctggtgctcctggtcatggtggtagtggctgtgcggcagctgcggcttcggaggcccgatgacgagagcagggaagccatgaacaatctgtcagacttccagaaggacaacctaatccctgccgcccagctcaaaaacacaaaccagaagaaggagctggaagtggactgtggtctggacaagtccaattgtggcaaactgcagaaccacacattggactacaatctagccccgggactcctaggacggggcggcatgcctgggaagtatcctcacagtgacaagagcttaggagagaaggtgccacttcggttacacagtgagaagccagagtgtcgaatatcagccatttgctctcccagggactctatgtaccaatcagtgtgtttgatatcagaagagaggaacgagtgtgtgattgccacagaggtataaggcaggagcctactcagacacccagctccggcccagcagctgggccttccttctgcattgtttacattgcatcctgtatgggacatctttagtatgcacagtgctgctctgcggaggaggaggaaatggcatgaactgaacagactgtgaacccgccaagagtcgcaccggctctgcacacctccaggagtctgcctggcttcagatgggcagccccgccaagggaacagagttgaggagttagaggagcatcagttgagctgatatctaaggtgcctctcgaacttggacttgctctgccaacagtggtcatcatggagctcttgactgttctccagagagtggcagtggccctagtgggtcttggcgctgctgtagctcctgtgggcatctgtatttccaaagtgcctttgcccagactccatcctcacagctgggcccaaatgagaaagcagagaggaggcttgcaaaggataggcctcccgcaggcagaacagccttggagtttggcattaagcaggagctactctgcaggtgaggaaagcccgaggaggggacacgtgtgactcctgcctccaaccccagtaggtggagtgccacctgtagcctctaggcaagagttggtccttcccctggtcctggtgcctctgggctcatgtgaacagatgggcttagggcacgccccttttgccagccaggggtacaggcctcactggggagctcagggccttcatgctaaactcccaataagggagatggggggaagggggctgtggcctaggcccttccctccctcacacccatttctgggcccttgagcctgggctccaccagtgcccactgctgccccgagaccaaccttgaagccgatcttcaaaaatcaataatatgaggttttgttttgtagtttattttggaatctagtattttgataatttaagaatcagaagcactggcctttctacattttataacattattttgtatataatgtgtatttataatatgaaaaaaaaaaaaaaaagggcggccgc

SEQ ID NO: 25 - protein, 686 aa, Mus Musculus
MTPASRSACRWALLLLAVLWPQQRAAGSGIFQLRLQEFVNQRGMLANGQSCEPGCRTFFRICLKHFQATFSEGPCTFGNVSTPVLGTNSFVVRDKNSGSGRNPLQLPFNFTWPGTFSLNIQAWHTPGDDLRPETSPGNSLISQIIIQGSLAVGKIWRTDEQNDTLTRLSYSYRVICSDNYYGESCSRLCKKRDDHFGHYECQPDGSLSCLPGWTGKYCDQPICLSGCHEQNGYCSKPDECICRPGWQGRLCNECIPHNGCRHGTCSIPWQCACDEGWGGLFCDQDLNYCTHHSPCKNGSTCSNSGPKGYTCTCLPGYTGEHCELGLSKCASNPCRNGGSCKDQENSYHCLCPPGYYGQHCEHSTLTCADSPCFNGGSCRERNQGSSYACECPPNFTGSNCEKKVDRCTSNPCANGGQCQNRGPSRTCRCRPGFTGTHCELHISDCARSPCAHGGTCHDLENGPVCTCPAGFSGRRCEVRITHDACASGPCFNGATCYTGLSPNNFVCNCPYGFVGSRCEFPVGLPPSFPWVAVSLGVGLVVLLVLLVMVVVAVRQLRLRRPDDESREAMNNLSDFQKDNLIPAAQLKNTNQKKELEVDCGLDKSNCGKLQNHTLDYNLAPGLLGRGGMPGKYPHSDKSLGEKVPLRLHSEKPECRISAICSPRDSMYQSVCLISEERNECVIATEV

SEQ ID NO: 26 - DNA, 2058 bp, Mus Musculus
atgacgcctgcgtcccggagcgcctgtcgctgggcgctactgctgctggcggtactgtggccgcagcagcgcgctgcgggctccggcatcttccagctgcggctgcaggagttcgtcaaccagcgcggtatgctggccaatgggcagtcctgcgaaccgggctgccggactttcttccgcatctgccttaagcacttccaggcaaccttctccgagggaccctgcacctttggcaatgtctccacgccggtattgggcaccaactccttcgtcgtcagggacaagaatagcggcagtggtcgcaaccctctgcagttgcccttcaatttcacctggccgggaaccttctcactcaacatccaagcttggcacacaccgggagacgacctgcggccagagacttcgccaggaaactctctcatcagccaaatcatcatccaaggctctcttgctgtgggtaagatttggcgaacagacgagcaaaatgacaccctcaccagactgagctactcttaccgggtcatctgcagtgacaactactatggagagagctgttctcgcctatgcaagaagcgcgatgaccacttcggacattatgagtgccagccagatggcagcctgtcctgcctgccgggctggactgggaagtactgtgaccagcctatatgtctttctggctgtcatgagcagaatggttactgcagcaagccagatgagtgcatctgccgtccaggttggcagggtcgcctgtgcaatgaatgtatcccccacaatggctgtcgtcatggcacctgcagcatcccctggcagtgtgcctgcgatgagggatggggaggtctgttttgtgaccaagatctcaactactgtactcaccactctccgtgcaagaatggatcaacgtgttccaacagtgggccaaagggttatacctgcacctgtctcccaggctacactggtgagcactgtgagctgggactcagcaagtgtgccagcaacccctgtcgaaatggtggcagctgtaaggaccaggagaatagctaccactgcctgtgtcccccaggctactatggccagcactgtgagcatagtaccttgacctgcgcggactcaccctgcttcaatgggggctcttgccgggagcgcaaccaggggtccagttatgcctgcgaatgcccccccaactttaccggctctaactgtgagaagaaagtagacaggtgtaccagcaacccgtgtgccaatggaggccagtgccagaacagaggtccaagccgaacctgccgctgccggcctggattcacaggcacccactgtgaactgcacatcagcgattgtgcccgaagtccctgtgcccacgggggcacttgccacgatctggagaatgggcctgtgtgcacctgccccgctggcttctctggaaggcgctgcgaggtgcggataacccacgatgcctgtgcctccggaccctgcttcaatggggccacctgctacactggcctctccccaaacaacttcgtctgcaactgtccttatggctttgtgggcagccgctgcgagtttcccgtgggcttgccacccagcttcccctgggtagctgtctcgctgggcgtggggctagtggtactgctggtgctcctggtcatggtggtagtggctgtgcggcagctgcggcttcggaggcccgatgacgagagcagggaagccatgaacaatctgtcagacttccagaaggacaacctaatccctgccgcccagctcaaaaacacaaaccagaagaaggagctggaagtggactgtggtctggacaagtccaattgtggcaaactgcagaaccacacattggactacaatctagccccgggactcctaggacggggcggcatgcctgggaagtatcctcacagtgacaagagcttaggagagaaggtgccacttcggttacacagtgagaagccagagtgtcgaatatcagccatttgctctcccagggactctatgtaccaatcagtgtgtttgatatcagaagagaggaacgagtgtgtgattgccacagaggta

SEQ ID NO: 27 - DNA, 2800 bp, Homo Sapiens
  CDS (338)..(2395)
gtcgacccacgcgtccggctgcgcgcaggccgggaacacgaggccaagagccgcagccccagccgccttggtgcagcgtacaccggcactagcccgcttgcagccccaggattagacagaagacgcgtcctcggcgcggtcgccgcccagccgtagtcacctggattacctacagcggcagctgcagcggagccagcgagaaggccaaaggggagcagcgtcccgagaggagcgcctcttttcagggaccccgccggctggcggacgcgcgggaaagcggcgtcgcgaacagagccagattgagggcccgcgggtggagagagcgacgcccgaggggatggcggcagcgtcccggagcgcctctggctgggcgctactgctgctggtggcactttggcagcagcgcgcggccggctccggcgtcttccagctgcagctgcaggagttcatcaaccagcgcggcgtactggccagtgggcggccttgcgagcccggctgccggactttcttccgcgtctgccttaagcacttccaggcggtcgtctcgcccggaccctgcaccttcgggaccgtctccacgccggtattgggcaccaactccttcgctgtccgggacgacagtagcggcggggggcgcaaccctctccaactgcccttcaatttcacctggccgggtaccttctcgctcatcatcgaagcttggcacgcgccaggagacgacctgcggccagaggccttgccaccagatgcactcatcagcaagatcgccatccagggctccctagctgtgggtcagaactggttattggatgagcaaaccagcaccctcacaaggctgcgctactcttaccgggtcatctgcagtgacaactactatggagacaactgctcccgcctgtgcaagaagcgcaatgaccacttcggccactatgtgtgccagccagatggcaacttgtcctgcctgcccggttggactggggaatattgccaacagcctatctgtctttcgggctgtcatgaacagaatggctactgcagcaagccagcagagtgcctctgccgcccaggctggcagggccggctgtgtaacgaatgcatcccccacaatggctgtcgccacggcacctgcagcactccctggcaatgtacttgtgatgagggctggggaggcctgttttgtgaccaagatctcaactactgcacccaccactccccatgcaagaatggggcaacgtgctccaacagtgggcagcgaagctacacctgcacctgtcgcccaggctacactggtgtggactgtgagctggagctcagcgagtgtgacagcaacccctgtcgcaatggaggcagctgtaaggaccaggaggatggctaccactgcctgtgtcctccgggctactatggcctgcattgtgaacacagcaccttgagctgcgccgactccccctgcttcaatgggggctcctgccgggagcgcaaccagggggccaactatgcttgtgaatgtccccccaacttcaccggctccaactgcgagaagaaagtggacaggtgcaccagcaacccctgtgccaacgggggacagtgcctgaaccgaggtccaagccgcatgtgccgctgccgtcctggattcacgggcacctactgtgaactccacgtcagcgactgtgcccgtaacccttgcgcccacggtggcacttgccatgacctggagaatgggctcatgtgcacctgccctgccggcttctctggccgacgctgtgaggtgcggacatccatcgatgcctgtgcctcgagtccctgcttcaacagggccacctgctacaccgacctctccacagacacctttgtgtgcaactgcccttatggctttgtgggcagccgctgcgagttccccgtgggcttgccgcccagcttcccctgggtggccgtctcgctgggtgtggggctggcagtgctgctggtactgctgggcatggtggcagtggctgtgcggcagctgcggcttcgacggccggacgacggcagcagggaagccatgaacaacttgtcggacttccagaaggacaacctgattcctgccgcccagcttaaaaacacaaaccagaagaaggagctggaagtggactgtggcctggacaagtccaactgtggcaaacagcaaaaccacacattggactataatctggccccagggcccctggggcgggggaccatgccaggaaagtttccccacagtgacaagagcttaggagagaaggcgccactgcggttacacagtgaaaagccagagtgtcggatatcagcgatgtgctcccccagggactccatgtaccagtctgtgtgtttgatatcagaggagaggaatgaatgtgtcattgccacggaggtataaggcaggagcctacctggacatccctgctcagccccgcggctggaccttccttctgcattgtttacattgcatcctggatgggacgtttttcatatgcaacgtgctgctctcaggaggaggagggaatggcaggaaccggacagactgtgaacttgccaagagatgcaatacccttccacacctttgggtgtctgtctggcatcagattggcagctgcaccaaccagaggaacagaagagaagagagtggcagtagccccatggggcccggagctgctgtggcctccactggcatccgtgtttccaaaagtgcctttggcccagccaagggtgccaggcctaactggggcactcagggcagtgtgttggaaattccactgagggggaaatcaggtgctgcggccgc

SEQ ID NO: 28 - protein, 685 aa, Homo Sapiens
MAAASRSASGWALLLLVALWQQRAAGSGVFQLQLQEFINQRGVLASGRPCEPGCRTFFRVCLKHFQAVVSPGPCTFGTVSTPVLGTNSFAVRDDSSGGGRNPLQLPFNFTWPGTFSLIIEAWHAPGDDLRPEALPPDALISKIAIQGSLAVGQNWLLDEQTSTLTRLRYSYRVICSDNYYGDNCSRLCKKRNDHFGHYVCQPDGNLSCLPGWTGEYCQQPICLSGCHEQNGYCSKPAECLCRPGWQGRLCNECIPHNGCRHGTCSTPWQCTCDEGWGGLFCDQDLNYCTHHSPCKNGATCSNSGQRSYTCTCRPGYTGVDCELELSECDSNPCRNGGSCKDQEDGYHCLCPPGYYGLHCEHSTLSCADSPCFNGGSCRERNQGANYACECPPNFTGSNCEKKVDRCTSNPCANGGQCLNRGPSRMCRCRPGFTGTYCELHVSDCARNPCAHGGTCHDLENGLMCTCPAGFSGRRCEVRTSIDACASSPCFNRATCYTDLSTDTFVCNCPYGFVGSRCEFPVGLPPSFPWVAVSLGVGLAVLLVLLGMVAVAVRQLRLRRPDDGSREAMNNLSDFQKDNLIPAAQLKNTNQKKELEVDCGLDKSNCGKQQNHTLDYNLAPGPLGRGTMPGKFPHSDKSLGEKAPLRLHSEKPECRISAMCSPRDSMYQSVCLISEERNECVIATEV

SEQ ID NO: 29 - DNA, 2800 bp, Homo Sapiens
  CDS (338)..(457)
gtcgacccacgcgtccggctgcgcgcaggccgggaacacgaggccaagagccgcagccccagccgccttggtgcagcgtacaccggcactagcccgcttgcagccccaggattagacagaagacgcgtcctcggcgcggtcgccgcccagccgtagtcacctggattacctacagcggcagctgcagcggagccagcgagaaggccaaaggggagcagcgtcccgagaggagcgcctcttttcagggaccccgccggctggcggacgcgcgggaaagcggcgtcgcgaacagagccagattgagggcccgcgggtggagagagcgacgcccgaggggatggcggcagcgtcccggagcgcctctggctgggcgctactgctgctggtggcactttggcagcagcgcgcggccggctccggcgtcttccagctgcagctgcaggagttcatcaactagcgcggcgtactggccagtgggcggccttgcgagcccggctgccggactttcttccgcgtctgccttaagcacttccaggcggtcgtctcgcccggaccctgcaccttcgggaccgtctccacgccggtattgggcaccaactccttcgctgtccgggacgacagtagcggcggggggcgcaaccctctccaactgcccttcaatttcacctggccgggtaccttctcgctcatcatcgaagcttggcacgcgccaggagacgacctgcggccagaggccttgccaccagatgcactcatcagcaagatcgccatccagggctccctagctgtgggtcagaactggttattggatgagcaaaccagcaccctcacaaggctgcgctactcttaccgggtcatctgcagtgacaactactatggagacaactgctcccgcctgtgcaagaagcgcaatgaccacttcggccactatgtgtgccagccagatggcaacttgtcctgcctgcccggttggactggggaatattgccaacagcctatctgtctttcgggctgtcatgaacagaatggctactgcagcaagccagcagagtgcctctgccgcccaggctggcagggccggctgtgtaacgaatgcatcccccacaatggctgtcgccacggcacctgcagcactccctggcaatgtacttgtgatgagggctggggaggcctgttttgtgaccaagatctcaactactgcacccaccactccccatgcaagaatggggcaacgtgctccaacagtgggcagcgaagctacacctgcacctgtcgcccaggctacactggtgtggactgtgagctggagctcagcgagtgtgacagcaacccctgtcgcaatggaggcagctgtaaggaccaggaggatggctaccactgcctgtgtcctccgggctactatggcctgcattgtgaacacagcaccttgagctgcgccgactccccctgcttcaatgggggctcctgccgggagcgcaaccagggggccaactatgcttgtgaatgtccccccaacttcaccggctccaactgcgagaagaaagtggacaggtgcaccagcaacccctgtgccaacgggggacagtgcctgaaccgaggtccaagccgcatgtgccgctgccgtcctggattcacgggcacctactgtgaactccacgtcagcgactgtgcccgtaacccttgcgcccacggtggcacttgccatgacctggagaatgggctcatgtgcacctgccctgccggcttctctggccgacgctgtgaggtgcggacatccatcgatgcctgtgcctcgagtccctgcttcaacagggccacctgctacaccgacctctccacagacacctttgtgtgcaactgcccttatggctttgtgggcagccgctgcgagttccccgtgggcttgccgcccagcttcccctgggtggccgtctcgctgggtgtggggctggcagtgctgctggtactgctgggcatggtggcagtggctgtgcggcagctgcggcttcgacggccggacgacggcagcagggaagccatgaacaacttgtcggacttccagaaggacaacctgattcctgccgcccagcttaaaaacacaaaccagaagaaggagctggaagtggactgtggcctggacaagtccaactgtggcaaacagcaaaaccacacattggactataatctggccccagggcccctggggcgggggaccatgccaggaaagtttccccacagtgacaagagcttaggagagaaggcgccactgcggttacacagtgaaaagccagagtgtcggatatcagcgatgtgctcccccagggactccatgtaccagtctgtgtgtttgatatcagaggagaggaatgaatgtgtcattgccacggaggtataaggcaggagcctacctggacatccctgctcagccccgcggctggaccttccttctgcattgtttacattgcatcctggatgggacgtttttcatatgcaacgtgctgctctcaggaggaggagggaatggcaggaaccggacagactgtgaacttgccaagagatgcaatacccttccacacctttgggtgtctgtctggcatcagattggcagctgcaccaaccagaggaacagaagagaagagagtggcagtagccccatggggcccggagctgctgtggcctccactggcatccgtgtttccaaaagtgcctttggcccagccaagggtgccaggcctaactggggcactcagggcagtgtgttggaaattccactgagggggaaatcaggtgctgcggccgc

SEQ ID NO: 30 - protein, 39 aa, Homo Sapiens
MAAASRSASGWALLLLVALWQQRAAGSGVFQLQLQEFIN

SEQ ID NO: 31 - DNA, 2800 bp, Homo Sapiens
  CDS (338)..(2395)
gtcgacccacgcgtccggctgcgcgcaggccgggaacacgaggccaagagccgcagccccagccgccttggtgcagcgtacaccggcactagcccgcttgcagccccaggattagacagaagacgcgtcctcggcgcggtcgccgcccagccgtagtcacctggattacctacagcggcagctgcagcggagccagcgagaaggccaaaggggagcagcgtcccgagaggagcgcctcttttcagggaccccgccggctggcggacgcgcgggaaagcggcgtcgcgaacagagccagattgagggcccgcgggtggagagagcgacgcccgaggggatggcggcagcgtcccggagcgcctctggctgggcgctactgctgctggtggcactttggcagcagcgcgcggccggctccggcgtcttccagctgcagctgcaggagttcatcaacaagcgcggcgtactggccagtgggcggccttgcgagcccggctgccggactttcttccgcgtctgccttaagcacttccaggcggtcgtctcgcccggaccctgcaccttcgggaccgtctccacgccggtattgggcaccaactccttcgctgtccgggacgacagtagcggcggggggcgcaaccctctccaactgcccttcaatttcacctggccgggtaccttctcgctcatcatcgaagcttggcacgcgccaggagacgacctgcggccagaggccttgccaccagatgcactcatcagcaagatcgccatccagggctccctagctgtgggtcagaactggttattggatgagcaaaccagcaccctcacaaggctgcgctactcttaccgggtcatctgcagtgacaactactatggagacaactgctcccgcctgtgcaagaagcgcaatgaccacttcggccactatgtgtgccagccagatggcaacttgtcctgcctgcccggttggactggggaatattgccaacagcctatctgtctttcgggctgtcatgaacagaatggctactgcagcaagccagcagagtgcctctgccgcccaggctggcagggccggctgtgtaacgaatgcatcccccacaatggctgtcgccacggcacctgcagcactccctggcaatgtacttgtgatgagggctggggaggcctgttttgtgaccaagatctcaactactgcacccaccactccccatgcaagaatggggcaacgtgctccaacagtgggcagcgaagctacacctgcacctgtcgcccaggctacactggtgtggactgtgagctggagctcagcgagtgtgacagcaacccctgtcgcaatggaggcagctgtaaggaccaggaggatggctaccactgcctgtgtcctccgggctactatggcctgcattgtgaacacagcaccttgagctgcgccgactccccctgcttcaatgggggctcctgccgggagcgcaaccagggggccaactatgcttgtgaatgtccccccaacttcaccggctccaactgcgagaagaaagtggacaggtgcaccagcaacccctgtgccaacgggggacagtgcctgaaccgaggtccaagccgcatgtgccgctgccgtcctggattcacgggcacctactgtgaactccacgtcagcgactgtgcccgtaacccttgcgcccacggtggcacttgccatgacctggagaatgggctcatgtgcacctgccctgccggcttctctggccgacgctgtgaggtgcggacatccatcgatgcctgtgcctcgagtccctgcttcaacagggccacctgctacaccgacctctccacagacacctttgtgtgcaactgcccttatggctttgtgggcagccgctgcgagttccccgtgggcttgccgcccagcttcccctgggtggccgtctcgctgggtgtggggctggcagtgctgctggtactgctgggcatggtggcagtggctgtgcggcagctgcggcttcgacggccggacgacggcagcagggaagccatgaacaacttgtcggacttccagaaggacaacctgattcctgccgcccagcttaaaaacacaaaccagaagaaggagctggaagtggactgtggcctggacaagtccaactgtggcaaacagcaaaaccacacattggactataatctggccccagggcccctggggcgggggaccatgccaggaaagtttccccacagtgacaagagcttaggagagaaggcgccactgcggttacacagtgaaaagccagagtgtcggatatcagcgatgtgctcccccagggactccatgtaccagtctgtgtgtttgatatcagaggagaggaatgaatgtgtcattgccacggaggtataaggcaggagcctacctggacatccctgctcagccccgcggctggaccttccttctgcattgtttacattgcatcctggatgggacgtttttcatatgcaacgtgctgctctcaggaggaggagggaatggcaggaaccggacagactgtgaacttgccaagagatgcaatacccttccacacctttgggtgtctgtctggcatcagattggcagctgcaccaaccagaggaacagaagagaagagagtggcagtagccccatggggcccggagctgctgtggcctccactggcatccgtgtttccaaaagtgcctttggcccagccaagggtgccaggcctaactggggcactcagggcagtgtgttggaaattccactgagggggaaatcaggtgctgcggccgc

SEQ ID NO: 32 - protein, 685 aa, Homo Sapiens
MAAASRSASGWALLLLVALWQQRAAGSGVFQLQLQEFINKRGVLASGRPCEPGCRTFFRVCLKHFQAVVSPGPCTFGTVSTPVLGTNSFAVRDDSSGGGRNPLQLPFNFTWPGTFSLIIEAWHAPGDDLRPEALPPDALISKIAIQGSLAVGQNWLLDEQTSTLTRLRYSYRVICSDNYYGDNCSRLCKKRNDHFGHYVCQPDGNLSCLPGWTGEYCQQPICLSGCHEQNGYCSKPAECLCRPGWQGRLCNECIPHNGCRHGTCSTPWQCTCDEGWGGLFCDQDLNYCTHHSPCKNGATCSNSGQRSYTCTCRPGYTGVDCELELSECDSNPCRNGGSCKDQEDGYHCLCPPGYYGLHCEHSTLSCADSPCFNGGSCRERNQGANYACECPPNFTGSNCEKKVDRCTSNPCANGGQCLNRGPSRMCRCRPGFTGTYCELHVSDCARNPCAHGGTCHDLENGLMCTCPAGFSGRRCEVRTSIDACASSPCFNRATCYTDLSTDTFVCNCPYGFVGSRCEFPVGLPPSFPWVAVSLGVGLAVLLVLLGMVAVAVRQLRLRRPDDGSREAMNNLSDFQKDNLIPAAQLKNTNQKKELEVDCGLDKSNCGKQQNHTLDYNLAPGPLGRGTMPGKFPHSDKSLGEKAPLRLHSEKPECRISAMCSPRDSMYQSVCLISEERNECVIATEV

SEQ ID NO: 33 - DNA, 2800 bp, Homo Sapiens
  CDS (338)..(2395)
gtcgacccacgcgtccggctgcgcgcaggccgggaacacgaggccaagagccgcagccccagccgccttggtgcagcgtacaccggcactagcccgcttgcagccccaggattagacagaagacgcgtcctcggcgcggtcgccgcccagccgtagtcacctggattacctacagcggcagctgcagcggagccagcgagaaggccaaaggggagcagcgtcccgagaggagcgcctcttttcagggaccccgccggctggcggacgcgcgggaaagcggcgtcgcgaacagagccagattgagggcccgcgggtggagagagcgacgcccgaggggatggcggcagcgtcccggagcgcctctggctgggcgctactgctgctggtggcactttggcagcagcgcgcggccggctccggcgtcttccagctgcagctgcaggagttcatcaacgagcgcggcgtactggccagtgggcggccttgcgagcccggctgccggactttcttccgcgtctgccttaagcacttccaggcggtcgtctcgcccggaccctgcaccttcgggaccgtctccacgccggtattgggcaccaactccttcgctgtccgggacgacagtagcggcggggggcgcaaccctctccaactgcccttcaatttcacctggccgggtaccttctcgctcatcatcgaagcttggcacgcgccaggagacgacctgcggccagaggccttgccaccagatgcactcatcagcaagatcgccatccagggctccctagttgtgggtcagaactggttattggatgagcaaaccagcaccctcacaaggctgcgctactcttaccgggtcatctgcagtgacaactactatggagacaactgctcccgcctgtgcaagaagcgcaatgaccacttcggccactatgtgtgccagccagatggcaacttgtcctgcctgcccggttggactggggaatattgccaacagcctatctgtctttcgggctgtcatgaacagaatggctactgcagcaagccagcagagtgcctctgccgcccaggctggcagggccggctgtgtaacgaatgcatcccccacaatggctgtcgccacggcacctgcagcactccctggcaatgtacttgtgatgagggctggggaggcctgttttgtgaccaagatctcaactactgcacccaccactccccatgcaagaatggggcaacgtgctccaacagtgggcagcgaagctacacctgcacctgtcgcccaggctacactggtgtggactgtgagctggagctcagcgagtgtgacagcaacccctgtcgcaatggaggcagctgtaaggaccaggaggatggctaccactgcctgtgtcctccgggctactatggcctgcattgtgaacacagcaccttgagctgcgccgactccccctgcttcaatgggggctcctgccgggagcgcaaccagggggccaactatgcttgtgaatgtccccccaacttcaccggctccaactgcgagaagaaagtggacaggtgcaccagcaacccctgtgccaacgggggacagtgcctgaaccgaggtccaagccgcatgtgccgctgccgtcctggattcacgggcacctactgtgaactccacgtcagcgactgtgcccgtaacccttgcgcccacggtggcacttgccatgacctggagaatgggctcatgtgcacctgccctgccggcttctctggccgacgctgtgaggtgcggacatccatcgatgcctgtgcctcgagtccctgcttcaacagggccacctgctacaccgacctctccacagacacctttgtgtgcaactgcccttatggctttgtgggcagccgctgcgagttccccgtgggcttgccgcccagcttcccctgggtggccgtctcgctgggtgtggggctggcagtgctgctggtactgctgggcatggtggcagtggctgtgcggcagctgcggcttcgacggccggacgacggcagcagggaagccatgaacaacttgtcggacttccagaaggacaacctgattcctgccgcccagcttaaaaacacaaaccagaagaaggagctggaagtggactgtggcctggacaagtccaactgtggcaaacagcaaaaccacacattggactataatctggccccagggcccctggggcgggggaccatgccaggaaagtttccccacagtgacaagagcttaggagagaaggcgccactgcggttacacagtgaaaagccagagtgtcggatatcagcgatgtgctcccccagggactccatgtaccagtctgtgtgtttgatatcagaggagaggaatgaatgtgtcattgccacggaggtataaggcaggagcctacctggacatccctgctcagccccgcggctggaccttccttctgcattgtttacattgcatcctggatgggacgtttttcatatgcaacgtgctgctctcaggaggaggagggaatggcaggaaccggacagactgtgaacttgccaagagatgcaatacccttccacacctttgggtgtctgtctggcatcagattggcagctgcaccaaccagaggaacagaagagaagagagtggcagtagccccatggggcccggagctgctgtggcctccactggcatccgtgtttccaaaagtgcctttggcccagccaagggtgccaggcctaactggggcactcagggcagtgtgttggaaattccactgagggggaaatcaggtgctgcggccgc

SEQ ID NO: 34 - protein, 685 aa, Homo Sapiens
MAAASRSASGWALLLLVALWQQRAAGSGVFQLQLQEFINERGVLASGRPCEPGCRTFFRVCLKHFQAVVSPGPCTFGTVSTPVLGTNSFAVRDDSSGGGRNPLQLPFNFTWPGTFSLIIEAWHAPGDDLRPEALPPDALISKIAIQGSLVVGQNWLLDEQTSTLTRLRYSYRVICSDNYYGDNCSRLCKKRNDHFGHYVCQPDGNLSCLPGWTGEYCQQPICLSGCHEQNGYCSKPAECLCRPGWQGRLCNECIPHNGCRHGTCSTPWQCTCDEGWGGLFCDQDLNYCTHHSPCKNGATCSNSGQRSYTCTCRPGYTGVDCELELSECDSNPCRNGGSCKDQEDGYHCLCPPGYYGLHCEHSTLSCADSPCFNGGSCRERNQGANYACECPPNFTGSNCEKKVDRCTSNPCANGGQCLNRGPSRMCRCRPGFTGTYCELHVSDCARNPCAHGGTCHDLENGLMCTCPAGFSGRRCEVRTSIDACASSPCFNRATCYTDLSTDTFVCNCPYGFVGSRCEFPVGLPPSFPWVAVSLGVGLAVLLVLLGMVAVAVRQLRLRRPDDGSREAMNNLSDFQKDNLIPAAQLKNTNQKKELEVDCGLDKSNCGKQQNHTLDYNLAPGPLGRGTMPGKFPHSDKSLGEKAPLRLHSEKPECRISAMCSPRDSMYQSVCLISEERNECVIATEV

SEQ ID NO: 35 - DNA, 2800 bp, Homo Sapiens
  CDS (338)..(2395)
gtcgacccacgcgtccggctgcgcgcaggccgggaacacgaggccaagagccgcagccccagccgccttggtgcagcgtacaccggcactagcccgcttgcagccccaggattagacagaagacgcgtcctcggcgcggtcgccgcccagccgtagtcacctggattacctacagcggcagctgcagcggagccagcgagaaggccaaaggggagcagcgtcccgagaggagcgcctcttttcagggaccccgccggctggcggacgcgcgggaaagcggcgtcgcgaacagagccagattgagggcccgcgggtggagagagcgacgcccgaggggatggcggcagcgtcccggagcgcctctggctgggcgctactgctgctggtggcactttggcagcagcgcgcggccggctccggcgtcttccagctgcagctgcaggagttcatcaacgagcgcggcgtactggccagtgggcggccttgcgagcccggctgccggactttcttccgcgtctgccttaagcacttccaggcggtcgtctcgcccggaccctgcaccttcgggaccgtctccacgccggtattgggcagcaactccttcgctgtccgggacgacagtagcggcggggggcgcaaccctctccaactgcccttcaatttcacctggccgggtaccttctcgctcatcatcgaagcttggcacgcgccaggagacgacctgcggccagaggccttgccaccagatgcactcatcagcaagatcgccatccagggctccctagctgtgggtcagaactggttattggatgagcaaaccagcaccctcacaaggctgcgctactcttaccgggtcatctgcagtgacaactactatggagacaactgctcccgcctgtgcaagaagcgcaatgaccacttcggccactatgtgtgccagccagatggcaacttgtcctgcctgcccggttggactggggaatattgccaacagcctatctgtctttcgggctgtcatgaacagaatggctactgcagcaagccagcagagtgcctctgccgcccaggctggcagggccggctgtgtaacgaatgcatcccccacaatggctgtcgccacggcacctgcagcactccctggcaatgtacttgtgatgagggctggggaggcctgttttgtgaccaagatctcaactactgcacccaccactccccatgcaagaatggggcaacgtgctccaacagtgggcagcgaagctacacctgcacctgtcgcccaggctacactggtgtggactgtgagctggagctcagcgagtgtgacagcaacccctgtcgcaatggaggcagctgtaaggaccaggaggatggctaccactgcctgtgtcctccgggctactatggcctgcattgtgaacacagcaccttgagctgcgccgactccccctgcttcaatgggggctcctgccgggagcgcaaccagggggccaactatgcttgtgaatgtccccccaacttcaccggctccaactgcgagaagaaagtggacaggtgcaccagcaacccctgtgccaacgggggacagtgcctgaaccgaggtccaagccgcatgtgccgctgccgtcctggattcacgggcacctactgtgaactccacgtcagcgactgtgcccgtaacccttgcgcccacggtggcacttgccatgacctggagaatgggctcatgtgcacctgccctgccggcttctctggccgacgctgtgaggtgcggacatccatcgatgcctgtgcctcgagtccctgcttcaacagggccacctgctacaccgacctctccacagacacctttgtgtgcaactgcccttatggctttgtgggcagccgctgcgagttccccgtgggcttgccgcccagcttcccctgggtggccgtctcgctgggtgtggggctggcagtgctgctggtactgctgggcatggtggcagtggctgtgcggcagctgcggcttcgacggccggacgacggcagcagggaagccatgaacaacttgtcggacttccagaaggacaacctgattcctgccgcccagcttaaaaacacaaaccagaagaaggagctggaagtggactgtggcctggacaagtccaactgtggcaaacagcaaaaccacacattggactataatctggccccagggcccctggggcgggggaccatgccaggaaagtttccccacagtgacaagagcttaggagagaaggcgccactgcggttacacagtgaaaagccagagtgtcggatatcagcgatgtgctcccccagggactccatgtaccagtctgtgtgtttgatatcagaggagaggaatgaatgtgtcattgccacggaggtataaggcaggagcctacctggacatccctgctcagccccgcggctggaccttccttctgcattgtttacattgcatcctggatgggacgtttttcatatgcaacgtgctgctctcaggaggaggagggaatggcaggaaccggacagactgtgaacttgccaagagatgcaatacccttccacacctttgggtgtctgtctggcatcagattggcagctgcaccaaccagaggaacagaagagaagagagtggcagtagccccatggggcccggagctgctgtggcctccactggcatccgtgtttccaaaagtgcctttggcccagccaagggtgccaggcctaactggggcactcagggcagtgtgttggaaattccactgagggggaaatcaggtgctgcggccgc

SEQ ID NO: 36 - protein, 685 aa, Homo Sapiens
MAAASRSASGWALLLLVALWQQRAAGSGVFQLQLQEFINERGVLASGRPCEPGCRTFFRVCLKHFQAVVSPGPCTFGTVSTPVLGSNSFAVRDDSSGGGRNPLQLPFNFTWPGTFSLIIEAWHAPGDDLRPEALPPDALISKIAIQGSLAVGQNWLLDEQTSTLTRLRYSYRVICSDNYYGDNCSRLCKKRNDHFGHYVCQPDGNLSCLPGWTGEYCQQPICLSGCHEQNGYCSKPAECLCRPGWQGRLCNECIPHNGCRHGTCSTPWQCTCDEGWGGLFCDQDLNYCTHHSPCKNGATCSNSGQRSYTCTCRPGYTGVDCELELSECDSNPCRNGGSCKDQEDGYHCLCPPGYYGLHCEHSTLSCADSPCFNGGSCRERNQGANYACECPPNFTGSNCEKKVDRCTSNPCANGGQCLNRGPSRMCRCRPGFTGTYCELHVSDCARNPCAHGGTCHDLENGLMCTCPAGFSGRRCEVRTSIDACASSPCFNRATCYTDLSTDTFVCNCPYGFVGSRCEFPVGLPPSFPWVAVSLGVGLAVLLVLLGMVAVAVRQLRLRRPDDGSREAMNNLSDFQKDNLIPAAQLKNTNQKKELEVDCGLDKSNCGKQQNHTLDYNLAPGPLGRGTMPGKFPHSDKSLGEKAPLRLHSEKPECRISAMCSPRDSMYQSVCLISEERNECVIATEV

SEQ ID NO: 37 - DNA, 2800 bp, Homo Sapiens
  CDS (338)..(2395)
gtcgacccacgcgtccggctgcgcgcaggccgggaacacgaggccaagagccgcagccccagccgccttggtgcagcgtacaccggcactagcccgcttgcagccccaggattagacagaagacgcgtcctcggcgcggtcgccgcccagccgtagtcacctggattacctacagcggcagctgcagcggagccagcgagaaggccaaaggggagcagcgtcccgagaggagcgcctcttttcagggaccccgccggctggcggacgcgcgggaaagcggcgtcgcgaacagagccagattgagggcccgcgggtggagagagcgacgcccgaggggatggcggcagcgtcccggagcgcctctggctgggcgctactgctgctggtggcactttggcagcagcgcgcggccggctccggcgtcttccagctgcagctgcaggagttcatcaacgagcgcggcgtactggccagtgggcggccttgcgagcccggctgccggactttcttccgcgtctgccttaagcacttccaggcggtcgtctcgcccggaccctgcaccttcgggaccgtctccacgccggtattgggcaccaactccttcgctgtccgggacgacagtagcggcggggggcgcaaccctctccaactgcccttcaatttcacctggccgggtaccttctcgctcatcatcgaagcttggcacgcgccaggagacgacctgcggccagaggccttgccaccagatgcactcatcagcaagatcgccatccagggctccctagctgtgggtcagaactggttattggatgagcaaaccagcaccctcacaaggctgcgctactcttaccgggtcatctgcagtgacaactactatggagaaaactgctcccgcctgtgcaagaagcgcaatgaccacttcggccactatgtgtgccagccagatggcaacttgtcctgcctgcccggttggactggggaatattgccaacagcctatctgtctttcgggctgtcatgaacagaatggctactgcagcaagccagcagagtgcctctgccgcccaggctggcagggccggctgtgtaacgaatgcatcccccacaatggctgtcgccacggcacctgcagcactccctggcaatgtacttgtgatgagggctggggaggcctgttttgtgaccaagatctcaactactgcacccaccactccccatgcaagaatggggcaacgtgctccaacagtgggcagcgaagctacacctgcacctgtcgcccaggctacactggtgtggactgtgagctggagctcagcgagtgtgacagcaacccctgtcgcaatggaggcagctgtaaggaccaggaggatggctaccactgcctgtgtcctccgggctactatggcctgcattgtgaacacagcaccttgagctgcgccgactccccctgcttcaatgggggctcctgccgggagcgcaaccagggggccaactatgcttgtgaatgtccccccaacttcaccggctccaactgcgagaagaaagtggacaggtgcaccagcaacccctgtgccaacgggggacagtgcctgaaccgaggtccaagccgcatgtgccgctgccgtcctggattcacgggcacctactgtgaactccacgtcagcgactgtgcccgtaacccttgcgcccacggtggcacttgccatgacctggagaatgggctcatgtgcacctgccctgccggcttctctggccgacgctgtgaggtgcggacatccatcgatgcctgtgcctcgagtccctgcttcaacagggccacctgctacaccgacctctccacagacacctttgtgtgcaactgcccttatggctttgtgggcagccgctgcgagttccccgtgggcttgccgcccagcttcccctgggtggccgtctcgctgggtgtggggctggcagtgctgctggtactgctgggcatggtggcagtggctgtgcggcagctgcggcttcgacggccggacgacggcagcagggaagccatgaacaacttgtcggacttccagaaggacaacctgattcctgccgcccagcttaaaaacacaaaccagaagaaggagctggaagtggactgtggcctggacaagtccaactgtggcaaacagcaaaaccacacattggactataatctggccccagggcccctggggcgggggaccatgccaggaaagtttccccacagtgacaagagcttaggagagaaggcgccactgcggttacacagtgaaaagccagagtgtcggatatcagcgatgtgctcccccagggactccatgtaccagtctgtgtgtttgatatcagaggagaggaatgaatgtgtcattgccacggaggtataaggcaggagcctacctggacatccctgctcagccccgcggctggaccttccttctgcattgtttacattgcatcctggatgggacgtttttcatatgcaacgtgctgctctcaggaggaggagggaatggcaggaaccggacagactgtgaacttgccaagagatgcaatacccttccacacctttgggtgtctgtctggcatcagattggcagctgcaccaaccagaggaacagaagagaagagagtggcagtagccccatggggcccggagctgctgtggcctccactggcatccgtgtttccaaaagtgcctttggcccagccaagggtgccaggcctaactggggcactcagggcagtgtgttggaaattccactgagggggaaatcaggtgctgcggccgc

SEQ ID NO: 38 - protein, 685 aa, Homo Sapiens
MAAASRSASGWALLLLVALWQQRAAGSGVFQLQLQEFINERGVLASGRPCEPGCRTFFRVCLKHFQAVVSPGPCTFGTVSTPVLGTNSFAVRDDSSGGGRNPLQLPFNFTWPGTFSLIIEAWHAPGDDLRPEALPPDALISKIAIQGSLAVGQNWLLDEQTSTLTRLRYSYRVICSDNYYGENCSRLCKKRNDHFGHYVCQPDGNLSCLPGWTGEYCQQPICLSGCHEQNGYCSKPAECLCRPGWQGRLCNECIPHNGCRHGTCSTPWQCTCDEGWGGLFCDQDLNYCTHHSPCKNGATCSNSGQRSYTCTCRPGYTGVDCELELSECDSNPCRNGGSCKDQEDGYHCLCPPGYYGLHCEHSTLSCADSPCFNGGSCRERNQGANYACECPPNFTGSNCEKKVDRCTSNPCANGGQCLNRGPSRMCRCRPGFTGTYCELHVSDCARNPCAHGGTCHDLENGLMCTCPAGFSGRRCEVRTSIDACASSPCFNRATCYTDLSTDTFVCNCPYGFVGSRCEFPVGLPPSFPWVAVSLGVGLAVLLVLLGMVAVAVRQLRLRRPDDGSREAMNNLSDFQKDNLIPAAQLKNTNQKKELEVDCGLDKSNCGKQQNHTLDYNLAPGPLGRGTMPGKFPHSDKSLGEKAPLRLHSEKPECRISAMCSPRDSMYQSVCLISEERNECVIATEV

SEQ ID NO: 39 - DNA, 3133 bp, Mus Musculus
  CDS (39)..(2099)
gtcgacccacgcgtccggtggagaggacaccccaagggatgacgcctgtgtcccggagcgcctgtcgctgggcgctactgctgctggcggtactgtggccgcagcagcgcgctgcgggctccggcatcttccagctgcggctgcaggagttcgtcaaccagcgcggtatgctggccaatgggcagtcctgcgaaccgggctgccggactttcttccgcatctgccttaagcacttccaggcaaccttctccgagggaccctgcacctttggcaatgtctccacgccggtattgggcaccaactccttcgtcgtcagggacaagaatagcggcagtggtcgcaaccctctgcagttgcccttcaatttcacctggccgggaaccttctcactcaacatccaagcttggcacacaccgggagacgacctgcggccagagacttcgccaggaaactctctcatcagccaaatcatcatccaaggctctcttgctgtgggtaagatttggcgaacagacgagcaaaatgacaccctcaccagactgagctactcttaccgggtcatctgcagtgacaactactatggagagagctgttctcgcctatgcaagaagcgcgatgaccacttcggacattatgagtgccagccagatggcagcctgtcctgcctgccgggctggactgggaagtactgtgaccagcctatatgtctttctggctgtcatgagcagaatggttactgcagcaagccagatgagtgcatctgccgtccaggttggcagggtcgcctgtgcaatgaatgtatcccccacaatggctgtcgtcatggcacctgcagcatcccctggcagtgtgcctgcgatgagggatggggaggtctgttttgtgaccaagatctcaactactgtactcaccactctccgtgcaagaatggatcaacgtgttccaacagtgggccaaagggttatacctgcacctgtctcccaggctacactggtgagcactgtgagctgggactcagcaagtgtgccagcaacccctgtcgaaatggtggcagctgtaaggaccaggagaatagctaccactgcctgtgtcccccaggctactatggccagcactgtgagcatagtaccttgacctgcgcggactcaccctgcttcaatgggggctcttgccgggagcgcaaccaggggtccagttatgcctgcgaatgcccccccaactttaccggctctaactgtgagaagaaagtagacaggtgtaccagcaacccgtgtgccaatggaggccagtgccagaacagaggtccaagccgaacctgccgctgccggcctggattcacaggcacccactgtgaactgcacatcagcgattgtgcccgaagtccctgtgcccacgggggcacttgccacgatctggagaatgggcctgtgtgcacctgccccgctggcttctctggaaggcgctgcgaggtgcggataacccacgatgcctgtgcctccggaccctgcttcaatggggccacctgctacactggcctctccccaaacaacttcgtctgcaactgtccttatggctttgtgggcagccgctgcgagtttcccgtgggcttgccacccagcttcccctgggtagctgtctcgctgggcgtggggctagtggtactgctggtgctcctggtcatggtggtagtggctgtgcggcagctgcggcttcggaggcccgatgacgagagcagggaagccatgaacaatctgtcagacttccagaaggacaacctaatccctgccgcccagctcaaaaacacaaaccagaagaaggagctggaagtggactgtggtctggacaagtccaattgtggcaaactgcagaaccacacattggactacaatctagccccgggactcctaggacggggcggcatgcctgggaagtatcctcacagtgacaagagcttaggagagaaggtgccacttcggttacacagtgagaagccagagtgtcgaatatcagccatttgctctcccagggactctatgtaccaatcagtgtgtttgatatcagaagagaggaacgagtgtgtgattgccacagaggtataaggcaggagcctactcagacacccagctccggcccagcagctgggccttccttctgcattgtttacattgcatcctgtatgggacatctttagtatgcacagtgctgctctgcggaggaggaggaaatggcatgaactgaacagactgtgaacccgccaagagtcgcaccggctctgcacacctccaggagtctgcctggcttcagatgggcagccccgccaagggaacagagttgaggagttagaggagcatcagttgagctgatatctaaggtgcctctcgaacttggacttgctctgccaacagtggtcatcatggagctcttgactgttctccagagagtggcagtggccctagtgggtcttggcgctgctgtagctcctgtgggcatctgtatttccaaagtgcctttgcccagactccatcctcacagctgggcccaaatgagaaagcagagaggaggcttgcaaaggataggcctcccgcaggcagaacagccttggagtttggcattaagcaggagctactctgcaggtgaggaaagcccgaggaggggacacgtgtgactcctgcctccaaccccagtaggtggagtgccacctgtagcctctaggcaagagttggtccttcccctggtcctggtgcctctgggctcatgtgaacagatgggcttagggcacgccccttttgccagccaggggtacaggcctcactggggagctcagggccttcatgctaaactcccaataagggagatggggggaagggggctgtggcctaggcccttccctccctcacacccatttctgggcccttgagcctgggctccaccagtgcccactgctgccccgagaccaaccttgaagccgatcttcaaaaatcaataatatgaggttttgttttgtagtttattttggaatctagtattttgataatttaagaatcagaagcactggcctttctacattttataacattattttgtatataatgtgtatttataatatgaaaaaaaaaaaaaaaagggcggccgc

SEQ ID NO: 40 - protein, 686 aa, Mus Musculus
MTPVSRSACRWALLLLAVLWPQQRAAGSGIFQLRLQEFVNQRGMLANGQSCEPGCRTFFRICLKHFQATFSEGPCTFGNVSTPVLGTNSFVVRDKNSGSGRNPLQLPFNFTWPGTFSLNIQAWHTPGDDLRPETSPGNSLISQIIIQGSLAVGKIWRTDEQNDTLTRLSYSYRVICSDNYYGESCSRLCKKRDDHFGHYECQPDGSLSCLPGWTGKYCDQPICLSGCHEQNGYCSKPDECICRPGWQGRLCNECIPHNGCRHGTCSIPWQCACDEGWGGLFCDQDLNYCTHHSPCKNGSTCSNSGPKGYTCTCLPGYTGEHCELGLSKCASNPCRNGGSCKDQENSYHCLCPPGYYGQHCEHSTLTCADSPCFNGGSCRERNQGSSYACECPPNFTGSNCEKKVDRCTSNPCANGGQCQNRGPSRTCRCRPGFTGTHCELHISDCARSPCAHGGTCHDLENGPVCTCPAGFSGRRCEVRITHDACASGPCFNGATCYTGLSPNNFVCNCPYGFVGSRCEFPVGLPPSFPWVAVSLGVGLVVLLVLLVMVVVAVRQLRLRRPDDESREAMNNLSDFQKDNLIPAAQLKNTNQKKELEVDCGLDKSNCGKLQNHTLDYNLAPGLLGRGGMPGKYPHSDKSLGEKVPLRLHSEKPECRISAICSPRDSMYQSVCLISEERNECVIATEV

SEQ ID NO: 41 - DNA, 3133 bp, Mus Musculus
  CDS (39)..(2099)
gtcgacccacgcgtccggtggagaggacaccccaagggatgacgcctgcgacccggagcgcctgtcgctgggcgctactgctgctggcggtactgtggccgcagcagcgcgctgcgggctccggcatcttccagctgcggctgcaggagttcgtcaaccagcgcggtatgctggccaatgggcagtcctgcgaaccgggctgccggactttcttccgcatctgccttaagcacttccaggcaaccttctccgagggaccctgcacctttggcaatgtctccacgccggtattgggcaccaactccttcgtcgtcagggacaagaatagcggcagtggtcgcaaccctctgcagttgcccttcaatttcacctggccgggaaccttctcactcaacatccaagcttggcacacaccgggagacgacctgcggccagagacttcgccaggaaactctctcatcagccaaatcatcatccaaggctctcttgctgtgggtaagatttggcgaacagacgagcaaaatgacaccctcaccagactgagctactcttaccgggtcatctgcagtgacaactactatggagagagctgttctcgcctatgcaagaagcgcgatgaccacttcggacattatgagtgccagccagatggcagcctgtcctgcctgccgggctggactgggaagtactgtgaccagcctatatgtctttctggctgtcatgagcagaatggttactgcagcaagccagatgagtgcatctgccgtccaggttggcagggtcgcctgtgcaatgaatgtatcccccacaatggctgtcgtcatggcacctgcagcatcccctggcagtgtgcctgcgatgagggatggggaggtctgttttgtgaccaagatctcaactactgtactcaccactctccgtgcaagaatggatcaacgtgttccaacagtgggccaaagggttatacctgcacctgtctcccaggctacactggtgagcactgtgagctgggactcagcaagtgtgccagcaacccctgtcgaaatggtggcagctgtaaggaccaggagaatagctaccactgcctgtgtcccccaggctactatggccagcactgtgagcatagtaccttgacctgcgcggactcaccctgcttcaatgggggctcttgccgggagcgcaaccaggggtccagttatgcctgcgaatgcccccccaactttaccggctctaactgtgagaagaaagtagacaggtgtaccagcaacccgtgtgccaatggaggccagtgccagaacagaggtccaagccgaacctgccgctgccggcctggattcacaggcacccactgtgaactgcacatcagcgattgtgcccgaagtccctgtgcccacgggggcacttgccacgatctggagaatgggcctgtgtgcacctgccccgctggcttctctggaaggcgctgcgaggtgcggataacccacgatgcctgtgcctccggaccctgcttcaatggggccacctgctacactggcctctccccaaacaacttcgtctgcaactgtccttatggctttgtgggcagccgctgcgagtttcccgtgggcttgccacccagcttcccctgggtagctgtctcgctgggcgtggggctagtggtactgctggtgctcctggtcatggtggtagtggctgtgcggcagctgcggcttcggaggcccgatgacgagagcagggaagccatgaacaatctgtcagacttccagaaggacaacctaatccctgccgcccagctcaaaaacacaaaccagaagaaggagctggaagtggactgtggtctggacaagtccaattgtggcaaactgcagaaccacacattggactacaatctagccccgggactcctaggacggggcggcatgcctgggaagtatcctcacagtgacaagagcttaggagagaaggtgccacttcggttacacagtgagaagccagagtgtcgaatatcagccatttgctctcccagggactctatgtaccaatcagtgtgtttgatatcagaagagaggaacgagtgtgtgattgccacagaggtataaggcaggagcctactcagacacccagctccggcccagcagctgggccttccttctgcattgtttacattgcatcctgtatgggacatctttagtatgcacagtgctgctctgcggaggaggaggaaatggcatgaactgaacagactgtgaacccgccaagagtcgcaccggctctgcacacctccaggagtctgcctggcttcagatgggcagccccgccaagggaacagagttgaggagttagaggagcatcagttgagctgatatctaaggtgcctctcgaacttggacttgctctgccaacagtggtcatcatggagctcttgactgttctccagagagtggcagtggccctagtgggtcttggcgctgctgtagctcctgtgggcatctgtatttccaaagtgcctttgcccagactccatcctcacagctgggcccaaatgagaaagcagagaggaggcttgcaaaggataggcctcccgcaggcagaacagccttggagtttggcattaagcaggagctactctgcaggtgaggaaagcccgaggaggggacacgtgtgactcctgcctccaaccccagtaggtggagtgccacctgtagcctctaggcaagagttggtccttcccctggtcctggtgcctctgggctcatgtgaacagatgggcttagggcacgccccttttgccagccaggggtacaggcctcactggggagctcagggccttcatgctaaactcccaataagggagatggggggaagggggctgtggcctaggcccttccctccctcacacccatttctgggcccttgagcctgggctccaccagtgcccactgctgccccgagaccaaccttgaagccgatcttcaaaaatcaataatatgaggttttgttttgtagtttattttggaatctagtattttgataatttaagaatcagaagcactggcctttctacattttataacattattttgtatataatgtgtatttataatatgaaaaaaaaaaaaaaaagggcggccgc

SEQ ID NO: 42 - protein, 686 aa, Mus Musculus
MTPATRSACRWALLLLAVLWPQQRAAGSGIFQLRLQEFVNQRGMLANGQSCEPGCRTFFRICLKHFQATFSEGPCTFGNVSTPVLGTNSFVVRDKNSGSGRNPLQLPFNFTWPGTFSLNIQAWHTPGDDLRPETSPGNSLISQIIIQGSLAVGKIWRTDEQNDTLTRLSYSYRVICSDNYYGESCSRLCKKRDDHFGHYECQPDGSLSCLPGWTGKYCDQPICLSGCHEQNGYCSKPDECICRPGWQGRLCNECIPHNGCRHGTCSIPWQCACDEGWGGLFCDQDLNYCTHHSPCKNGSTCSNSGPKGYTCTCLPGYTGEHCELGLSKCASNPCRNGGSCKDQENSYHCLCPPGYYGQHCEHSTLTCADSPCFNGGSCRERNQGSSYACECPPNFTGSNCEKKVDRCTSNPCANGGQCQNRGPSRTCRCRPGFTGTHCELHISDCARSPCAHGGTCHDLENGPVCTCPAGFSGRRCEVRITHDACASGPCFNGATCYTGLSPNNFVCNCPYGFVGSRCEFPVGLPPSFPWVAVSLGVGLVVLLVLLVMVVVAVRQLRLRRPDDESREAMNNLSDFQKDNLIPAAQLKNTNQKKELEVDCGLDKSNCGKLQNHTLDYNLAPGLLGRGGMPGKYPHSDKSLGEKVPLRLHSEKPECRISAICSPRDSMYQSVCLISEERNECVIATEV

SEQ ID NO: 43 - DNA, 3133 bp, Mus Musculus
  CDS (39)..(2099)
gtcgacccacgcgtccggtggagaggacaccccaagggatgacgcctgcgtcccggagcgcctgtcgctgggcgctactgctgctggcggtactgtggccgcagcagcacgctgcgggctccggcatcttccagctgcggctgcaggagttcgtcaaccagcgcggtatgctggccaatgggcagtcctgcgaaccgggctgccggactttcttccgcatctgccttaagcacttccaggcaaccttctccgagggaccctgcacctttggcaatgtctccacgccggtattgggcaccaactccttcgtcgtcagggacaagaatagcggcagtggtcgcaaccctctgcagttgcccttcaatttcacctggccgggaaccttctcactcaacatccaagcttggcacacaccgggagacgacctgcggccagagacttcgccaggaaactctctcatcagccaaatcatcatccaaggctctcttgctgtgggtaagatttggcgaacagacgagcaaaatgacaccctcaccagactgagctactcttaccgggtcatctgcagtgacaactactatggagagagctgttctcgcctatgcaagaagcgcgatgaccacttcggacattatgagtgccagccagatggcagcctgtcctgcctgccgggctggactgggaagtactgtgaccagcctatatgtctttctggctgtcatgagcagaatggttactgcagcaagccagatgagtgcatctgccgtccaggttggcagggtcgcctgtgcaatgaatgtatcccccacaatggctgtcgtcatggcacctgcagcatcccctggcagtgtgcctgcgatgagggatggggaggtctgttttgtgaccaagatctcaactactgtactcaccactctccgtgcaagaatggatcaacgtgttccaacagtgggccaaagggttatacctgcacctgtctcccaggctacactggtgagcactgtgagctgggactcagcaagtgtgccagcaacccctgtcgaaatggtggcagctgtaaggaccaggagaatagctaccactgcctgtgtcccccaggctactatggccagcactgtgagcatagtaccttgacctgcgcggactcaccctgcttcaatgggggctcttgccgggagcgcaaccaggggtccagttatgcctgcgaatgcccccccaactttaccggctctaactgtgagaagaaagtagacaggtgtaccagcaacccgtgtgccaatggaggccagtgccagaacagaggtccaagccgaacctgccgctgccggcctggattcacaggcacccactgtgaactgcacatcagcgattgtgcccgaagtccctgtgcccacgggggcacttgccacgatctggagaatgggcctgtgtgcacctgccccgctggcttctctggaaggcgctgcgaggtgcggataacccacgatgcctgtgcctccggaccctgcttcaatggggccacctgctacactggcctctccccaaacaacttcgtctgcaactgtccttatggctttgtgggcagccgctgcgagtttcccgtgggcttgccacccagcttcccctgggtagctgtctcgctgggcgtggggctagtggtactgctggtgctcctggtcatggtggtagtggctgtgcggcagctgcggcttcggaggcccgatgacgagagcagggaagccatgaacaatctgtcagacttccagaaggacaacctaatccctgccgcccagctcaaaaacacaaaccagaagaaggagctggaagtggactgtggtctggacaagtccaattgtggcaaactgcagaaccacacattggactacaatctagccccgggactcctaggacggggcggcatgcctgggaagtatcctcacagtgacaagagcttaggagagaaggtgccacttcggttacacagtgagaagccagagtgtcgaatatcagccatttgctctcccagggactctatgtaccaatcagtgtgtttgatatcagaagagaggaacgagtgtgtgattgccacagaggtataaggcaggagcctactcagacacccagctccggcccagcagctgggccttccttctgcattgtttacattgcatcctgtatgggacatctttagtatgcacagtgctgctctgcggaggaggaggaaatggcatgaactgaacagactgtgaacccgccaagagtcgcaccggctctgcacacctccaggagtctgcctggcttcagatgggcagccccgccaagggaacagagttgaggagttagaggagcatcagttgagctgatatctaaggtgcctctcgaacttggacttgctctgccaacagtggtcatcatggagctcttgactgttctccagagagtggcagtggccctagtgggtcttggcgctgctgtagctcctgtgggcatctgtatttccaaagtgcctttgcccagactccatcctcacagctgggcccaaatgagaaagcagagaggaggcttgcaaaggataggcctcccgcaggcagaacagccttggagtttggcattaagcaggagctactctgcaggtgaggaaagcccgaggaggggacacgtgtgactcctgcctccaaccccagtaggtggagtgccacctgtagcctctaggcaagagttggtccttcccctggtcctggtgcctctgggctcatgtgaacagatgggcttagggcacgccccttttgccagccaggggtacaggcctcactggggagctcagggccttcatgctaaactcccaataagggagatggggggaagggggctgtggcctaggcccttccctccctcacacccatttctgggcccttgagcctgggctccaccagtgcccactgctgccccgagaccaaccttgaagccgatcttcaaaaatcaataatatgaggttttgttttgtagtttattttggaatctagtattttgataatttaagaatcagaagcactggcctttctacattttataacattattttgtatataatgtgtatttataatatgaaaaaaaaaaaaaaaagggcggccgc

SEQ ID NO: 44 - protein, 686 aa, Mus Musculus
MTPASRSACRWALLLLAVLWPQQHAAGSGIFQLRLQEFVNQRGMLANGQSCEPGCRTFFRICLKHFQATFSEGPCTFGNVSTPVLGTNSFVVRDKNSGSGRNPLQLPFNFTWPGTFSLNIQAWHTPGDDLRPETSPGNSLISQIIIQGSLAVGKIWRTDEQNDTLTRLSYSYRVICSDNYYGESCSRLCKKRDDHFGHYECQPDGSLSCLPGWTGKYCDQPICLSGCHEQNGYCSKPDECICRPGWQGRLCNECIPHNGCRHGTCSIPWQCACDEGWGGLFCDQDLNYCTHHSPCKNGSTCSNSGPKGYTCTCLPGYTGEHCELGLSKCASNPCRNGGSCKDQENSYHCLCPPGYYGQHCEHSTLTCADSPCFNGGSCRERNQGSSYACECPPNFTGSNCEKKVDRCTSNPCANGGQCQNRGPSRTCRCRPGFTGTHCELHISDCARSPCAHGGTCHDLENGPVCTCPAGFSGRRCEVRITHDACASGPCFNGATCYTGLSPNNFVCNCPYGFVGSRCEFPVGLPPSFPWVAVSLGVGLVVLLVLLVMVVVAVRQLRLRRPDDESREAMNNLSDFQKDNLIPAAQLKNTNQKKELEVDCGLDKSNCGKLQNHTLDYNLAPGLLGRGGMPGKYPHSDKSLGEKVPLRLHSEKPECRISAICSPRDSMYQSVCLISEERNECVIATEV

SEQ ID NO: 45 - DNA, 3133 bp, Mus Musculus
  CDS (39)..(2099)
gtcgacccacgcgtccggtggagaggacaccccaagggatgacgcctgcgtcccggagcgcctgtcgctgggcgctactgctgctggcggtactgtggccgcagcagcgcgctgcgggctccggcatctaccagctgcggctgcaggagttcgtcaaccagcgcggtatgctggccaatgggcagtcctgcgaaccgggctgccggactttcttccgcatctgccttaagcacttccaggcaaccttctccgagggaccctgcacctttggcaatgtctccacgccggtattgggcaccaactccttcgtcgtcagggacaagaatagcggcagtggtcgcaaccctctgcagttgcccttcaatttcacctggccgggaaccttctcactcaacatccaagcttggcacacaccgggagacgacctgcggccagagacttcgccaggaaactctctcatcagccaaatcatcatccaaggctctcttgctgtgggtaagatttggcgaacagacgagcaaaatgacaccctcaccagactgagctactcttaccgggtcatctgcagtgacaactactatggagagagctgttctcgcctatgcaagaagcgcgatgaccacttcggacattatgagtgccagccagatggcagcctgtcctgcctgccgggctggactgggaagtactgtgaccagcctatatgtctttctggctgtcatgagcagaatggttactgcagcaagccagatgagtgcatctgccgtccaggttggcagggtcgcctgtgcaatgaatgtatcccccacaatggctgtcgtcatggcacctgcagcatcccctggcagtgtgcctgcgatgagggatggggaggtctgttttgtgaccaagatctcaactactgtactcaccactctccgtgcaagaatggatcaacgtgttccaacagtgggccaaagggttatacctgcacctgtctcccaggctacactggtgagcactgtgagctgggactcagcaagtgtgccagcaacccctgtcgaaatggtggcagctgtaaggaccaggagaatagctaccactgcctgtgtcccccaggctactatggccagcactgtgagcatagtaccttgacctgcgcggactcaccctgcttcaatgggggctcttgccgggagcgcaaccaggggtccagttatgcctgcgaatgcccccccaactttaccggctctaactgtgagaagaaagtagacaggtgtaccagcaacccgtgtgccaatggaggccagtgccagaacagaggtccaagccgaacctgccgctgccggcctggattcacaggcacccactgtgaactgcacatcagcgattgtgcccgaagtccctgtgcccacgggggcacttgccacgatctggagaatgggcctgtgtgcacctgccccgctggcttctctggaaggcgctgcgaggtgcggataacccacgatgcctgtgcctccggaccctgcttcaatggggccacctgctacactggcctctccccaaacaacttcgtctgcaactgtccttatggctttgtgggcagccgctgcgagtttcccgtgggcttgccacccagcttcccctgggtagctgtctcgctgggcgtggggctagtggtactgctggtgctcctggtcatggtggtagtggctgtgcggcagctgcggcttcggaggcccgatgacgagagcagggaagccatgaacaatctgtcagacttccagaaggacaacctaatccctgccgcccagctcaaaaacacaaaccagaagaaggagctggaagtggactgtggtctggacaagtccaattgtggcaaactgcagaaccacacattggactacaatctagccccgggactcctaggacggggcggcatgcctgggaagtatcctcacagtgacaagagcttaggagagaaggtgccacttcggttacacagtgagaagccagagtgtcgaatatcagccatttgctctcccagggactctatgtaccaatcagtgtgtttgatatcagaagagaggaacgagtgtgtgattgccacagaggtataaggcaggagcctactcagacacccagctccggcccagcagctgggccttccttctgcattgtttacattgcatcctgtatgggacatctttagtatgcacagtgctgctctgcggaggaggaggaaatggcatgaactgaacagactgtgaacccgccaagagtcgcaccggctctgcacacctccaggagtctgcctggcttcagatgggcagccccgccaagggaacagagttgaggagttagaggagcatcagttgagctgatatctaaggtgcctctcgaacttggacttgctctgccaacagtggtcatcatggagctcttgactgttctccagagagtggcagtggccctagtgggtcttggcgctgctgtagctcctgtgggcatctgtatttccaaagtgcctttgcccagactccatcctcacagctgggcccaaatgagaaagcagagaggaggcttgcaaaggataggcctcccgcaggcagaacagccttggagtttggcattaagcaggagctactctgcaggtgaggaaagcccgaggaggggacacgtgtgactcctgcctccaaccccagtaggtggagtgccacctgtagcctctaggcaagagttggtccttcccctggtcctggtgcctctgggctcatgtgaacagatgggcttagggcacgccccttttgccagccaggggtacaggcctcactggggagctcagggccttcatgctaaactcccaataagggagatggggggaagggggctgtggcctaggcccttccctccctcacacccatttctgggcccttgagcctgggctccaccagtgcccactgctgccccgagaccaaccttgaagccgatcttcaaaaatcaataatatgaggttttgttttgtagtttattttggaatctagtattttgataatttaagaatcagaagcactggcctttctacattttataacattattttgtatataatgtgtatttataatatgaaaaaaaaaaaaaaaagggcggccgc

SEQ ID NO: 46 - protein, 686 aa, Mus Musculus
MTPASRSACRWALLLLAVLWPQQRAAGSGIYQLRLQEFVNQRGMLANGQSCEPGCRTFFRICLKHFQATFSEGPCTFGNVSTPVLGTNSFVVRDKNSGSGRNPLQLPFNFTWPGTFSLNIQAWHTPGDDLRPETSPGNSLISQIIIQGSLAVGKIWRTDEQNDTLTRLSYSYRVICSDNYYGESCSRLCKKRDDHFGHYECQPDGSLSCLPGWTGKYCDQPICLSGCHEQNGYCSKPDECICRPGWQGRLCNECIPHNGCRHGTCSIPWQCACDEGWGGLFCDQDLNYCTHHSPCKNGSTCSNSGPKGYTCTCLPGYTGEHCELGLSKCASNPCRNGGSCKDQENSYHCLCPPGYYGQHCEHSTLTCADSPCFNGGSCRERNQGSSYACECPPNFTGSNCEKKVDRCTSNPCANGGQCQNRGPSRTCRCRPGFTGTHCELHISDCARSPCAHGGTCHDLENGPVCTCPAGFSGRRCEVRITHDACASGPCFNGATCYTGLSPNNFVCNCPYGFVGSRCEFPVGLPPSFPWVAVSLGVGLVVLLVLLVMVVVAVRQLRLRRPDDESREAMNNLSDFQKDNLIPAAQLKNTNQKKELEVDCGLDKSNCGKLQNHTLDYNLAPGLLGRGGMPGKYPHSDKSLGEKVPLRLHSEKPECRISAICSPRDSMYQSVCLISEERNECVIATEV

SEQ ID NO: 47 - DNA, 24 bp, Mus Musculus
ctccgggacgcaggcgtcatccct

SEQ ID NO: 48 - DNA, 29 bp, Mus Musculus
acaggcgctccgggacgcaggcgtcatcc

SEQ ID NO: 49 - DNA, 26 bp, Mus Musculus
ggtgtcctctccaccggacgcgtggg

SEQ ID NO: 50 - DNA, 22 bp, Mus Musculus
gtcctctccaccggacgcgtgg

SEQ ID NO: 51 - DNA, 20 bp, Homo Sapiens
gtttacattgcatcctggat

SEQ ID NO: 52 - protein, 41 aa, Artificial Sequence
  EGF-like domain consensus sequence
  VARIANT (2)..(5): Xaa is any amino acid
  VARIANT (6)..(9): Xaa is any amino acid or is absent
  VARIANT (11)..(11): Xaa is any amino acid
  VARIANT (12)..(12): Xaa is any amino acid or is absent
  misc_feature (14)..(14): Xaa can be any naturally occurring amino acid
  VARIANT (16)..(20): Xaa is any amino acid
  VARIANT (21)..(24): Xaa is any amino acid or is absent
  VARIANT (25)..(25): Xaa is Trp, Phe or Tyr
  misc_feature (26)..(26): Xaa can be any naturally occurring amino acid
  misc_feature (28)..(28): Xaa can be any naturally occurring amino acid
  VARIANT (30)..(31): Xaa is any amino acid
  VARIANT (32)..(33): Xaa is any amino acid or is absent
  VARIANT (35)..(35): Xaa is Trp, Phe or Tyr
  VARIANT (37)..(37): Xaa is any amino acid
  VARIANT (38)..(39): Xaa is any amino acid or is absent
  VARIANT (40)..(40): Xaa is Phe or Tyr
CXXXXXXXXCXXGXCXXXXXXXXXXXCXCXXXXGXGXXXXC

SEQ ID NO: 53 - DNA, 2133 bp, Homo Sapiens
  CDS (73)..(1275)
gtcgacccacgcgtccgccggagcgctcgcccagccgccgcctccaagcccctgaggtttccggggaccacaatgaacaagttgctgtgctgcgcgctcgtgtttctggacatctccattaagtggaccacccaggaaacgtttcctccaaagtaccttcattatgacgaagaaacttctcatcagctgttgtgtgacaaatgtcctcctggtacctacctaaaacaacactgtacagcaaagtggaagaccgtgtgcgccccttgccctgaccactactacacagacagctggcacaccagtgacgagtgtctatactgcagccccgtgtgcaaggagctgcagtacgtcaagcaggagtgcaatcgcacccacaaccgcgtgtgcgaatgcaaggaagggcgctaccttgagatagagttctgcttgaaacataggagctgccctcctggatttggagtggtgcaagctggaaccccagagcgaaatacagtttgcaaaagatgtccagatgggttcttctcaaatgagacgtcatctaaagcaccctgtagaaaacacacaaattgcagtgtctttggtctcctgctaactcagaaaggaaatgcaacacacgacaacatatgttccggaaacagtgaatcaactcaaaaatgtggaatagatgttaccctgtgtgaggaggcattcttcaggtttgctgttcctacaaagtttacgcctaactggcttagtgtcttggtagacaatttgcctggcaccaaagtaaacgcagagagtgtagagaggataaaacggcaacacagctcacaagaacagactttccagctgctgaagttatggaaacatcaaaacaaagaccaagatatagtcaagaagatcatccaagatattgacctctgtgaaaacagcgtgcagcggcacattggacatgctaacctcaccttcgagcagcttcgtagcttgatggaaagcttaccgggaaagaaagtgggagcagaagacattgaaaaaacaataaaggcatgcaaacccagtgaccagatcctgaagctgctcagtttgtggcgaataaaaaatggcgaccaagacaccttgaagggcctaatgcacgcactaaagcactcaaagacgtaccactttcccaaaactgtcactcagagtctaaagaagaccatcaggttccttcacagcttcacaatgtacaaattgtatcagaagttatttttagaaatgataggtaaccaggtccaatcagtaaaaataagctgcttataactggaaatggccattgagctgtttcctcacaattggcgagatccccatggatgagtaaactgtttctcaggcacttgaggctttcagtgatatctttctcattaccagtgactaattttgccacagggtactaaaagaaactatgatgtggagaaaggactaacatctcctccaataaaccccaaatggttaatccaactgtcagatctggatcgttatctactgactatattttcccttattactgcttgcagtaattcaactggaaattaaaaaaaaaaaactagactccattgtgccttactaaatatgggaatgtctaacttaaatagctttgagatttcagctaygctagaggcttttattagaaagccatatttttttctgtaaaagttactaatatatctgtaacactattacagtattgctatttatattcattcagatataagatttgtacatattatcatcctataaagaaacggtatgacttaattttagaaagaaaattatattctgtttattatgacaaatgaaagagaaaatatatatttttaatggaaagtttgtagcatttttctaataggtactgccatatttttctgtgtggagtatttttataattttatctgtataagctgtaatatcattttatagaaaatgcattatttagtcaattgtttaatgttggaaaacatatgaaatataaattatctgaatattagatgctctgagaaattgaatgtaccttatttaaaagattttatggttttataactatataaatgacattattaaagttttcaaattatttttaaaaaaaaaaaaaaaaaaaaaaaaaaaaagggcggccgc

SEQ ID NO: 54 - protein, 401 aa, Homo Sapiens
MNKLLCCALVFLDISIKWTTQETFPPKYLHYDEETSHQLLCDKCPPGTYLKQHCTAKWKTVCAPCPDHYYTDSWHTSDECLYCSPVCKELQYVKQECNRTHNRVCECKEGRYLEIEFCLKHRSCPPGFGVVQAGTPERNTVCKRCPDGFFSNETSSKAPCRKHTNCSVFGLLLTQKGNATHDNICSGNSESTQKCGIDVTLCEEAFFRFAVPTKFTPNWLSVLVDNLPGTKVNAESVERIKRQHSSQEQTFQLLKLWKHQNKDQDIVKKIIQDIDLCENSVQRHIGHANLTFEQLRSLMESLPGKKVGAEDIEKTIKACKPSDQILKLLSLWRIKNGDQDTLKGLMHALKHSKTYHFPKTVTQSLKKTIRFLHSFTMYKLYQKLFLEMIGNQVQSVKISCL

SEQ ID NO: 55 - DNA, 1203 bp, Homo Sapiens
atgaacaagttgctgtgctgcgcgctcgtgtttctggacatctccattaagtggaccacccaggaaacgtttcctccaaagtaccttcattatgacgaagaaacttctcatcagctgttgtgtgacaaatgtcctcctggtacctacctaaaacaacactgtacagcaaagtggaagaccgtgtgcgccccttgccctgaccactactacacagacagctggcacaccagtgacgagtgtctatactgcagccccgtgtgcaaggagctgcagtacgtcaagcaggagtgcaatcgcacccacaaccgcgtgtgcgaatgcaaggaagggcgctaccttgagatagagttctgcttgaaacataggagctgccctcctggatttggagtggtgcaagctggaaccccagagcgaaatacagtttgcaaaagatgtccagatgggttcttctcaaatgagacgtcatctaaagcaccctgtagaaaacacacaaattgcagtgtctttggtctcctgctaactcagaaaggaaatgcaacacacgacaacatatgttccggaaacagtgaatcaactcaaaaatgtggaatagatgttaccctgtgtgaggaggcattcttcaggtttgctgttcctacaaagtttacgcctaactggcttagtgtcttggtagacaatttgcctggcaccaaagtaaacgcagagagtgtagagaggataaaacggcaacacagctcacaagaacagactttccagctgctgaagttatggaaacatcaaaacaaagaccaagatatagtcaagaagatcatccaagatattgacctctgtgaaaacagcgtgcagcggcacattggacatgctaacctcaccttcgagcagcttcgtagcttgatggaaagcttaccgggaaagaaagtgggagcagaagacattgaaaaaacaataaaggcatgcaaacccagtgaccagatcctgaagctgctcagtttgtggcgaataaaaaatggcgaccaagacaccttgaagggcctaatgcacgcactaaagcactcaaagacgtaccactttcccaaaactgtcactcagagtctaaagaagaccatcaggttccttcacagcttcacaatgtacaaattgtatcagaagttatttttagaaatgataggtaaccaggtccaatcagtaaaaataagctgctta

SEQ ID NO: 56 - DNA, 4291 bp, Homo Sapiens
  CDS (958)..(3216)
gtcgacccacgcgtccgaggagctggggtgagccgcggcggccgtctctcccacccgcagcagcatcctctctgcccttctctgccaccccggggagagccgggagctgcctctttacagcttccacgagccaggggtgcaggcagctgcccccaggaagtttgggcttctgcgtagtttaggggtgcctgcgagcgccccagagggcgaggggccgagggcgatgttgggcgccgcgcggggctgggggcgcccagaagacgtgcgagtgtccgcggtcctgctgctgtctccagtaccctccgcatcccccaagtgatgggaacaagggcccgcccaggcagccgctgtcgccgcaccgccccctcgctcgctctctgcgcgcggagtcacccagtcacactcccggcaccccgagcccttcctccggagctgctgcttctactttggctgctatcgccgccgccgcgggtggcccgctgctgactgggctcgccgggagacggagaagcactttttggccctccctcagcagctctcacaccccaactttgccgccgccgccgcgcctgccctcgcagcggcgctcggccgcacattgtgagggcgcacgccgggaggctccgcaagaccgtggaggcaggaaacggcactactgcgcttctgcctcggctctttgttgttcgctttggatggttcttgaaagtgtctgagcctcctcggaaatcctggggccggagaagacaaaccttggaattcttcctctgcaaaagtctctgagatactgacaagcgtccggaaaggtcgacgagtaattgccctgaaaactcttggctaattgacccacgttgcttatattaagcctttgtgtgtggtgtgtggcttcatacatttggggaccctatttccactccctcctcttggcatgagactgtatacaggatccacccgaggacaatgattgcggagcccgctcacttttacctgtttggattaatatgtctctgttcaggctcccgtcttcgtcaggaagattttccacctcgcattgttgaacacccttcagacctgattgtctcaaaaggagaacctgcaactttgaactgcaaagctgaaggccgccccacacccactattgaatggtacaaagggggagagagagtggagacagacaaagatgaccctcgctcacaccgaatgttgctgccgagtggatctttatttttcttacgtatagtacatggacggaaaagtagacctgatgaaggagtctatgtctgtgtagcaaggaattaccttggagaggctgtgagccacaatgcatcgctggaagtagccatacttcgggatgacttcagacaaaacccttcggatgtcatggttgcagtaggagagcctgcagtaatggaatgccaacctccacgaggccatcctgagcccaccatttcatggaagaaagatggctctccactggatgataaagatgaaagaataactatacgaggaggaaagctcatgatcacttacacccgtaaaagtgacgctggcaaatatgtttgtgttggtaccaatatggttggggaacgtgagagtgaagtagccgagctgactgtcttagagagaccatcatttgtgaagagacccagtaacttggcagtaactgtggatgacagtgcagaatttaaatgtgaggcccgaggtgaccctgtacctacagtacgatggaggaaagatgatggagagctgcccaaatccagatatgaaatccgagatgatcataccttgaaaattaggaaggtgacagctggtgacatgggttcatacacttgtgttgcagaaaatatggtgggcaaagctgaagcatctgctactctgactgttcaagttgggtctgaacctccacattttgttgtgaaaccccgtgaccaggttgttgctttgggacggactgtaacttttcagtgtgaagcaaccggaaatcctcaaccagctattttctggaggagagaagggagtcagaatctacttttctcatatcaaccaccacagtcatccagccgattttcagtctcccagactggcgacctcacaattactaatgtccagcgatctgatgttggttattacatctgccagactttaaatgttgctggaagcatcatcacaaaggcatatttggaagttacagatgtgattgcagatcggcctcccccagttattcgacaaggtcctgtgaatcagactgtagccgtggatggcactttcgtcctcagctgtgtggccacaggcagtccagtgcccaccattctgtggagaaaggatggagtcctcgtttcaacccaagactctcgaatcaaacagttggagaatggagtactgcagatccgatatgctaagctgggtgatactggtcggtacacctgcattgcatcaacccccagtggtgaagcaacatggagtgcttacattgaagttcaagaatttggagttccagttcagcctccaagacctactgacccaaatttaatccctagtgccccatcaaaacctgaagtgacagatgtcagcagaaatacagtcacattatcatggcaaccaaatttgaattcaggagcaactccaacatcttatattatagaagccttcagccatgcatctggtagcagctggcagaccgtagcagagaatgtgaaaacagaaacatctgccattaaaggactcaaacctaatgcaatttaccttttccttgtgagggcagctaatgcatatggaattagtgatccaagccaaatatcagatccagtgaaaacacaagatgtcctaccaacaagtcagggggtggaccacaagcaggtccagagagagctgggaaatgctgttctgcacctccacaaccccaccgtcctttcttcctcttccatcgaagtgcactggacagtagatcaacagtctcagtatatacaaggatataaaattctctatcggccatctggagccaaccacggagaatcagactggttagtttttgaagtgaggacgccagccaaaaacagtgtggtaatccctgatctcagaaagggagtcaactatgaaattaaggctcgccctttttttaatgaatttcaaggagcagatagtgaaatcaagtttgccaaaaccctggaagaaggcaagtatgatgaagcgtttgatttccatgcattgcagtatatttgttagaattttattagcttaatttaaattgttataatgttaatagtggcattaattactaactttcttgatattgaacatacattttgctaacagtatttgtttatttagaaaactagaaaagcaaaatgctataatagttgacttgcttcaatagtggcctacctcaaatgtgtaaatgtgaacattatattacttaatggcatatagaaatttaattattcagaactaaaattcacatttaaaaatgaaattgttttccgtttggtttattttccattcagcattttctatttgtttattttgatccatgatttgaataatgtgttgatttgcccaggacttcgtgggattagcattttcttcctaaatctcatctcttttaaaacacctcagttctagacaaatcactatagctgaccaccctattcctagaaattaaacaatatttacataaaggtaaaagattacattaactaacaacaggatttttcccaacatgtctttgtcactttggctgtataagtaattatcatgaatgattaatattcattttcatacttttgaacatttcgggggagaacatgagactagagttacacggtagaagaaataggaattgtcctgggatgtttggtggaaacaaggtatttaactttggttatggaaaattcaccgtggcagtgaattagcattgagtgaggaacaacttaggtagtttgggactattcagacttggatgagatacatctttaaaacatatgcagctgggcacagtggctcacgcctgtaaccccagcactttaggaggctgaggcgggcggatcacctgaagtcacgagttcgagaccagcctggccaaggcggtgaaaccccatctctattaaaaatacaaaaattagtggggcatggtggtgggtgcctgtaatcccagctactcagggggctgaggcaggagaatcgcttgaacccgggagggggaggttgcagtgagccgagatcatgtcacagcactacagcctagatgacagagcgagcctccgtctcaaaaaaaaaaaaaaaaaaaaagggcggccgc

SEQ ID NO: 57 - protein, 753 aa, Homo Sapiens [sequence omitted]

SEQ ID NO: 58 - DNA, 2259 bp, Homo Sapiens
atgattgcggagcccgctcacttttacctgtttggattaatatgtctctgttcaggctcccgtcttcgtcaggaagattttccacctcgcattgttgaacacccttcagacctgattgtctcaaaaggagaacctgcaactttgaactgcaaagctgaaggccgccccacacccactattgaatggtacaaagggggagagagagtggagacagacaaagatgaccctcgctcacaccgaatgttgctgccgagtggatctttatttttcttacgtatagtacatggacggaaaagtagacctgatgaaggagtctatgtctgtgtagcaaggaattaccttggagaggctgtgagccacaatgcatcgctggaagtagccatacttcgggatgacttcagacaaaacccttcggatgtcatggttgcagtaggagagcctgcagtaatggaatgccaacctccacgaggccatcctgagcccaccatttcatggaagaaagatggctctccactggatgataaagatgaaagaataactatacgaggaggaaagctcatgatcacttacacccgtaaaagtgacgctggcaaatatgtttgtgttggtaccaatatggttggggaacgtgagagtgaagtagccgagctgactgtcttagagagaccatcatttgtgaagagacccagtaacttggcagtaactgtggatgacagtgcagaatttaaatgtgaggcccgaggtgaccctgtacctacagtacgatggaggaaagatgatggagagctgcccaaatccagatatgaaatccgagatgatcataccttgaaaattaggaaggtgacagctggtgacatgggttcatacacttgtgttgcagaaaatatggtgggcaaagctgaagcatctgctactctgactgttcaagttgggtctgaacctccacattttgttgtgaaaccccgtgaccaggttgttgctttgggacggactgtaacttttcagtgtgaagcaaccggaaatcctcaaccagctattttctggaggagagaagggagtcagaatctacttttctcatatcaaccaccacagtcatccagccgattttcagtctcccagactggcgacctcacaattactaatgtccagcgatctgatgttggttattacatctgccagactttaaatgttgctggaagcatcatcacaaaggcatatttggaagttacagatgtgattgcagatcggcctcccccagttattcgacaaggtcctgtgaatcagactgtagccgtggatggcactttcgtcctcagctgtgtggccacaggcagtccagtgcccaccattctgtggagaaaggatggagtcctcgtttcaacccaagactctcgaatcaaacagttggagaatggagtactgcagatccgatatgctaagctgggtgatactggtcggtacacctgcattgcatcaacccccagtggtgaagcaacatggagtgcttacattgaagttcaagaatttggagttccagttcagcctccaagacctactgacccaaatttaatccctagtgccccatcaaaacctgaagtgacagatgtcagcagaaatacagtcacattatcatggcaaccaaatttgaattcaggagcaactccaacatcttatattatagaagccttcagccatgcatctggtagcagctggcagaccgtagcagagaatgtgaaaacagaaacatctgccattaaaggactcaaacctaatgcaatttaccttttccttgtgagggcagctaatgcatatggaattagtgatccaagccaaatatcagatccagtgaaaacacaagatgtcctaccaacaagtcagggggtggaccacaagcaggtccagagagagctgggaaatgctgttctgcacctccacaaccccaccgtcctttcttcctcttccatcgaagtgcactggacagtagatcaacagtctcagtatatacaaggatataaaattctctatcggccatctggagccaaccacggagaatcagactggttagtttttgaagtgaggacgccagccaaaaacagtgtggtaatccctgatctcagaaagggagtcaactatgaaattaaggctcgccctttttttaatgaatttcaaggagcagatagtgaaatcaagtttgccaaaaccctggaagaaggcaagtatgatgaagcgtttgatttccatgcattgcagtatatttgt

SEQ ID NO: 59 - protein, 85 aa, Homo Sapiens
PSAPSKPEVTDVSRNTVLSWQPNLNSGATPTSYIIEAFSHASGSSWQTVAENVKTETSAIKGLKPNAIYLFLVRAANAYGISDPS

SEQ ID NO: 60 - protein, 90 aa, Homo Sapiens
GNAVLHLHNPTVLSSSSIEVHWTVDQQSQYIQGYKILYRPSGANHGESDWLVFEVRTPAKNSVVIPDLRKGVNYEIKARPFFNEFQGADS

SEQ ID NO: 61 - protein, 68 aa, Homo Sapiens
GEPATLNCKAEGRPTPTIEWYKGGERVETDKDDPRSHRMLLPSGSLFFLRIVHGRKSRPDEGVYVCVA

SEQ ID NO: 62 - protein, 59 aa, Homo Sapiens
GEPAVMECQPPRGHPEPTISWKKDGSPLDDKDERITIRGGKLMITYTRKSDAGKYVCVG

SEQ ID NO: 63 - protein, 57 aa, Homo Sapiens
DDSAEFKCEARGDPVPTVRWRKDDGELPKSRYEIRDDHTLKIRKVTAGDMGSYTCVA

SEQ ID NO: 64 - protein, 66 aa, Homo Sapiens
GRTVTFQCEATGNPQPAIFWRREGSQNLLFSYQPPQSSSRFSVSQTGDLTITNVQRSDVGYYICQT

SEQ ID NO: 65 - protein, 59 aa, Homo Sapiens
DGTFVLSCVATGSPVPTILWRKDGVLVSTQDSRIKQLENGVLQIRYAKLGDTGRYTCVA

SEQ ID NO: 66 - DNA, 2122 bp, Homo Sapiens
  CDS (1)..(1047)
ccacgcgtccgccggagcgctcgcccagccgccgcctccaagcccctgaggtttccggggaccacaatgaacaagttgctgtgctgcgcgctcgtgtttctggacatctccattaagtggaccacccaggaaacgtttcctccaaagtaccttcattatgacgaagaaacctctcatcagctgttgtgtgacaaatgtcctcctggtacctacctaaaacaacactgtacagcaaagtggaagaccgtgtgcgccccttgccctgaccactactacacagacagctggcacaccagtgacgagtgtctatactgcagccccgtgtgcaaggagctgcagtacgtcaagcaggagtgcaatcgcacccacaaccgcgtgtgcgaatgcaaggaagggcgctaccttgagatagagttctgcttgaaacataggagctgccctcctggatttggagtggtgcaagctggaaccccagagcgaaatacagtttgcaaaagatgtccagatgggttcttctcaaatgagacgtcatctaaagcaccctgtagaaaacacacaaattgcagtgtctttggtctcctgctaactcagaaaggaaatgcaacacacgacaacatatgttccggaaacagtgaatcaactcaaaaatgtggaatagatgttaccctgtgtgaggaggcattcttcaggtttgctgttcctacaaagtttacgcctaactggcttagtgtcttggtagacaatttgcctggcaccaaagtaaacgcagagagtgtagagaggataaaacggcaacacagctcacaagaacagactttccagctgctgaagttatggaaacatcaaaacaaagaccaagatatagtccagaagatcatccaagatattgacctctgtgaaaacagcgtgcagcggcacattggacatgctaacctcaccttcgagcagcttcgtagcttgatggaaagcttaccggggaaagaaagtgggagcaggaaggacattggaaaaaacaataaaggcatgcaaacccagtggaccagatcctgaagctgctcagtttgtggcgaataaaaaatggcgaccaagacaccttgaagggcctaatgcacgcactaaagcactcaaagacgtaccactttcccaaaactgtcactcagagtctaaagaagaccatcaggttccttcacagcttcacaatgtacaaattgtatcagaagttatttttagaaatgataggtaaccaggtccaatcagtaaaaataagctgcttataactggaaatggccattgagctgtttcctcacaattggcgagatccccatggatgagtaaactgtttctcaggcacttgaggctttcagtgatatctttctcattaccagtgactaattttgccacagggtactaaaagaaactatgatgtggagaaaggactaacatctcctccaataaaccccaaatggttaatccaactgtcagatctggatcgttatctactgactatattttcccttattactgcttgcagtaattcaactggaaattaaaaaaaaaaaactagactccattgtgccttactaaatatgggaatgtctaacttaaatagctttgagatttcagctatgctagaggcttttattagaaagccatatttttttctgtaaaagttactaatatatctgtaacactattacagtattgctatttatattcattcagatataagatttgtacatattatcatcctataaagaaacggtatgacttaattttagaaagaaaattatattctgtttattatgacaaatgaaagagaaaatatatatttttaatggaaagtttgtagcatttttctaataggtactgccatatttttctgtgtggagtatttttataattttatctgtataagctgtaatatcattttatagaaaatgcattatttagtcaattgtttaatgttggaaaacatatgaaatataaattatctgaatattagatgctctgagaaattgaatgtaccttatttaaaagattttatggttttataactatataaatgacattattaaagttttcaaattatttttaaaaaaaaaaaaaaaaaaaaaaaaaaaaa

SEQ ID NO: 67 - protein, 349 aa, Homo Sapiens
PRVRRSARPAAASKPLRFPGTTMNKLLCCALVFLDISIKWTTQETFPPKYLHYDEETSHQLLCDKCPPGTYLKQHCTAKWKTVCAPCPDHYYTDSWHTSDECLYCSPVCKELQYVKQECNRTHNRVCECKEGRYLEIEFCLKHRSCPPGFGVVQAGTPERNTVCKRCPDGFFSNETSSKAPCRKHTNCSVFGLLLTQKGNATHDNICSGNSESTQKCGIDVTLCEEAFFRFAVPTKFTPNWLSVLVDNLPGTKVNAESVERIKRQHSSQEQTFQLLKLWKHQNKDQDIVQKIIQDIDLCENSVQRHIGHANLTFEQLRSLMESLPGKESGSRKDIGKNNKGMQTQWTRS

SEQ ID NO: 68 - protein, 84 aa, Homo Sapiens
PSPPRNLRVTDITPTSITVSWTPPEGNGPITGYRIQYRWPVNDNEWNEFNVPRTTNSYTITNLRPGTEYEFRVQAVNGDGGPWS

SEQ ID NO: 69 - protein, 47 aa, Homo Sapiens
GQSVTLTCMVSFHPPDYTIWWYRNGQPITLTINSWQYEDSGTYWCMV

SEQ ID NO: 70 - protein, 1651 aa, Homo Sapiens
MKWKHVPFLVMISLLSLSPNHLFLAQLIPDPEDVERGNDHGTPIPTSDNDDNSLGYTGSRLRQEDFPPRIVEHPSDLIVSKGEPATLNCKAEGRPTPTIEWYKGGERVETDKDDPRSHRMLLPSGSLFFLRIVHGRKSRPDEGVYVCVARNYLGEAVSHNASLEVAILRDDFRQNPSDVMVAVGEPAVMECQPPRGHPEPTISWKKDGSPLDDKDERITIRGGKLMITYTRKSDAGKYVCVGTNMVGERESEVAELTVLERPSFVKRPSNLAVTVDDSAEFKCEARGDPVPTVRWRKDDGELPKSRYEIRDDHTLKIRKVTAGDMGSYTCVAENMVGKAEASATLTVQEPPHFVVKPRDQVVALGRTVTFQCEATGNPQPAIFWRREGSQNLLFSYQPPQSSSRFSVSQTGDLTITNVQRSDVGYYICQTLNVAGSIITKAYLEVTDVIADRPPPVIRQGPVNQTVAVDGTFVLSCVATGSPVPTILWRKDGVLVSTQDSRIKQLENGVLQIRYAKLGDTGRYTCIASTPSGEATWSAYIEVQEFGVPVQPPRPTDPNLIPSAPSKPEVTDVSRNTVTLSWQPNLNSGATPTSYIIEAFSHASGSSWQTVAENVKTETSAIKGLKPNAIYLFLVRAANAYGISDPSQISDPVKTQDVLPTSQGVDHKQVQRELGNAVLHLHNPTVLSSSSIEVHWTVDQQSQYIQGYKILYRPSGANHGESDWLVFEVRTPAKNSVVIPDLRKGVNYEIKARPFFNEFQGADSEIKFAKTLEEAPSAPPQGVTVSKNDGNGTAILVSWQPPPEDTQNGMVQEYKVWCLGNETRYHINKTVDGSTFSVVIPFLVPGIRYSVEVAASTGAGSGVKSEPQFIQLDAHGNPVSPEDQVSLAQQISDVVKQPAFIAGIGAACWIILMVFSIWLYRHRKKRNGLTSTYAGIRKVPSFTFTPTVTYERGGEAVSSGGRPGLLNISEPAAQPWLADTWPNTGNNHNDCSISCCTAGNGNSDSNLTTYSRPADCIANYNNQLDNKQTNLMLPESTVYGDVDLSNKINEMKTFNSPNLKDGRFVNPSGQPTPYATTQLIQSNLSNNMNNGSGDSGEKHWKPLGQQKQEVAPVQYNIVEQNKLNKDYRANDTVPPTIPYNQSYDQNTGGSYNSSDRGSSTSGSQGHKKGARTPKVPKQGGMNWADLLPPPPAHPPPHSNSEEYNISVDESYDQEMPCPVPPARMYLQQDELEEEEDERGPTPPVRGAASSPAAVSYSHQSTATLTPSPQEELQPMLQDCPEETGHMQHQPDRRRQPVSPPPPPRPISPPHTYGYISGPLVSDMDTDAPEEEEDEADMEVAKMQTRRLLLRGLEQTPASSVGDLESSVTGSMINGWGSASEEDNISSGRSSVSSSDGSFFTDADFAQAVAAAAEYAGLKVARRQMQDAAGRRHFHASQCPRPTSPVSTDSNMSAAVMQKTRPAKKLKHQPGHLRRETYTDDLPPPPVPPPAIKSPTAQSKTQLEVRPVVVPKLPSMDARTDRSSDRKGSSYKGREVLDGRQVVDMRTNPGDPREAQEQQNDGKGRGNKAAKRDLPPAKTHLIQEDILPYCRPTFPTSNNPRDPSSSSSMSSRGSGSRQREQANVGRRNIAEMQVLGGYERGEDNNEELEETES

SEQ ID NO: 71 - DNA, 989 bp, Homo Sapiens
  CDS (356)..(889)
gtcgacccacgcgtccgcagacgtctacctgggggtcccgtctgcgctcccgggatggaaaacgcccaggggaaacttaggcaggcgagcggacgggcacctcccgcgggacgaactcactcggtggcctcctacttccccggccgtgttccaacgcctgagaataacgggaacagcggtcgtactcaccgacagcggcagcagcggcctctctcaattgggcaaagcactccagaccttttggaagagtgacaccaaaggcaagcacctgcttggcaggcccctcagcttctacgcaagtataagtcttggacttcattccattttctgttgagtaataaactcaacgttgaaaatgtcctttgtgggggagaactcaggagtgaaaatgggctctgaggactgggaaaaagatgaaccccagtgctgcttagaagacccggctggaagccccctggaaccaggcccaagcctccccaccatgaattttgttcacacaaagatcttctttgcattagcctcatccttgagctcagcctctgcggagaaaggaagtccgattctcctgggggtctctaaaggggagttttgtctctactgtgacaaggataaaggacaaagtcatccatcccttcagctgaagaaggagaaactgatgaagctggctgcccaaaaggaatcagcacgccggcccttcatcttttatagggctcaggtgggctcctggaacatgctggagtcggcggctcaccccggatggttcatctgcacctcctgcaattgtaatgagcctgttggggtgacagataaatttgagaacaggaaacacattgaattttcatttcaaccagtttgcaaagctgaaatgagccccagtgaggtcagcgattaggaaactgccccattgaacgccttcctcgctaatttgaactaattgtataaaaacaccaaacctgctcactaaaaaaaaaaaaaaaaagggcggccgc

SEQ ID NO: 72 - protein, 178 aa, Homo Sapiens
MSFVGENSGVKMGSEDWEKDEPQCCLEDPAGSPLEPGPSLPTMNFVHTKIFFALASSLSSASAEKGSPILLGVSKGEFCLYCDKDKGQSHPSLQLKKEKLMKLAAQKESARRPFIFYRAQVGSWNMLESAAHPGWFICTSCNCNEPVGVTDKFENRKHIEFSFQPVCKAEMSPSEVSD

SEQ ID NO: 73 - DNA, 534 bp, Homo Sapiens
atgtcctttgtgggggagaactcaggagtgaaaatgggctctgaggactgggaaaaagatgaaccccagtgctgcttagaagacccggctggaagccccctggaaccaggcccaagcctccccaccatgaattttgttcacacaaagatcttctttgcattagcctcatccttgagctcagcctctgcggagaaaggaagtccgattctcctgggggtctctaaaggggagttttgtctctactgtgacaaggataaaggacaaagtcatccatcccttcagctgaagaaggagaaactgatgaagctggctgcccaaaaggaatcagcacgccggcccttcatcttttatagggctcaggtgggctcctggaacatgctggagtcggcggctcaccccggatggttcatctgcacctcctgcaattgtaatgagcctgttggggtgacagataaatttgagaacaggaaacacattgaattttcatttcaaccagtttgcaaagctgaaatgagccccagtgaggtcagcgat

SEQ ID NO: 74 - protein, 63 aa, Homo Sapiens
MSFVGENSGVKMGSEDWEKDEPQCCLEDPAGSPLEPGPSLPTMNFVHTKIFFALASSLSSASA

SEQ ID NO: 75 - protein, 115 aa, Homo Sapiens
EKGSPILLGVSKGEFCLYCDKDKGQSHPSLQLKKEKLMKLAAQKESARRPFIFYRAQVGSWNMLESAAHPGWFICTSCNCNEPVGVTDKFENRKHIEFSFQPVCKAEMSPSEVSD

SEQ ID NO: 76 - DNA, 501 bp, Homo Sapiens
  CDS (1)..(501)
atgggctctgaggactgggaaaaagatgaaccccagtgctgcttagaagacccggctggaagccccctggaaccaggcccaagcctccccaccatgaattttgttcacacaaagatcttctttgcattagcctcatccttgagctcagcctctgcggagaaaggaagtccgattctcctgggggtctctaaaggggagttttgtctctactgtgacaaggataaaggacaaagtcatccatcccttcagctgaagaaggagaaactgatgaagctggctgcccaaaaggaatcagcacgccggcccttcatcttttatagggctcaggtgggctcctggaacatgctggagtcggcggctcaccccggatggttcatctgcacctcctgcaattgtaatgagcctgttggggtgacagataaatttgagaacaggaaacacattgaattttcatttcaaccagtttgcaaagctgaaatgagccccagtgaggtcagcgat

SEQ ID NO: 77 - protein, 167 aa, Homo Sapiens
MGSEDWEKDEPQCCLEDPAGSPLEPGPSLPTMNFVHTKIFFALASSLSSASAEKGSPILLGVSKGEFCLYCDKDKGQSHPSLQLKKEKLMKLAAQKESARRPFIFYRAQVGSWNMLESAAHPGWFICTSCNCNEPVGVTDKFENRKHIEFSFQPVCKAEMSPSEVSD

SEQ ID NO: 78 - protein, 52 aa, Homo Sapiens
MGSEDWEKDEPQCCLEDPAGSPLEPGPSLPTMNFVHTKIFFALASSLSSASA

SEQ ID NO: 79 - protein, 115 aa, Homo Sapiens; identical to SEQ ID NO: 75

SEQ ID NO: 80 - DNA, 408 bp, Homo Sapiens
  CDS (1)..(408)
atgaattttgttcacacaaagatcttctttgcattagcctcatccttgagctcagcctctgcggagaaaggaagtccgattctcctgggggtctctaaaggggagttttgtctctactgtgacaaggataaaggacaaagtcatccatcccttcagctgaagaaggagaaactgatgaagctggctgcccaaaaggaatcagcacgccggcccttcatcttttatagggctcaggtgggctcctggaacatgctggagtcggcggctcaccccggatggttcatctgcacctcctgcaattgtaatgagcctgttggggtgacagataaatttgagaacaggaaacacattgaattttcatttcaaccagtttgcaaagctgaaatgagccccagtgaggtcagcgat

SEQ ID NO: 81 - protein, 136 aa, Homo Sapiens
MNFVHTKIFFALASSLSSASAEKGSPILLGVSKGEFCLYCDKDKGQSHPSLQLKKEKLMKLAAQKESARRPFIFYRAQVGSWNMLESAAHPGWFICTSCNCNEPVGVTDKFENRKHIEFSFQPVCKAEMSPSEVSD

SEQ ID NO: 82 - protein, 21 aa, Homo Sapiens
MNFVHTKIFFALASSLSSASA

SEQ ID NO: 83 - protein, 115 aa, Homo Sapiens; identical to SEQ ID NO: 75

SEQ ID NO: 84 - protein, 177 aa, Homo Sapiens
MEICRGLRSHLITLLLFLFHSETICRPSGRKSSKMQAFRIWDVNQKTFYLRNNQLVAGYLQGPNVNLEEKIDVVPIEPHALFLGIHGGKMCLSCVKSGDETRLQLEAVNITDLSENRKQDKRFAFIRSDSGPTTSFESAACPGWFLCTAMEADQPVSLTNMPDEGVMVTKFYFQEDE

SEQ ID NO: 85 - protein, 153 aa, Homo Sapiens
APVRSLNCTLRDSQQKSLVMSGPYELKALHLQGQDMEQQVVFSMSFVQGEESNDKIPVALGLKEKNLYLSCVLKDDKPTLQLESVDPKNYPKKKMEKRFVFNKIEINNKLEFESAQFPNWYISTSQAENMPVFLGGTKGGQDITDFTMQFVSS

SEQ ID NO: 86 - DNA, 152331 bp, Homo Sapiens
  misc_feature (1)..(152331): n = A,T,C or G
gaagtgaagatataatgtatagtagtaatatataatgttaggtgaattaaaggaaatagaatatattggggagtaattatgggtgtaaagaaatatagtagggaagtatttagatttgagaaaaaaaaaaaggaatttagtgtaggtgaanaataaaagnanaaggttaaaaattaaaaaaaaattaaatataaataaataaataaaaataaaaataaaataaaaaatttaaaaaattaaaaaaatataaaaaataaagaaatggaagtggattcttagaaaaaaaagaaagtaaggtgatatgaggagatagagaggatgtggtgtgagatgattggtttaattagaaaataggttttgaatagagtgggaaagtagagttttggtaaatgtggggggaagagggtaatgttgtttgagtgaaagaaaaaatggtatatttttataaaataatgaggaaagtgtgtgaaaaaaaaattattgggatttgggaaggtgatatataaagttgtggaaaatttggggggtggggtttatttaggattaaaaagttatttaaagaatgaaaatgaatttttgtttgtaatttggggataagaaattaatgtttagaaagaaagggaaaaaattgaagaaaaaaatttagattttggaaatttaaaaatattgtgggtgtaaataggaaggatttttaaaggtaattgtggaagggatttgtgtggaaaataatagggagaaaaaatgggggcatctaactggagcctgcattattacagatttagcatcaccaaagtctaaacaattagactgactaaggcagaactgcccttatgacagcagacataagaaggaaaaggccaaaacactgtgttaaaaattatccaaatgtgaggaaaaggcaaagagagtaggtgtgcctttttagtgtctaagctgcctgcccaaggggcatctgatgctctcaggcaggagtccacaaatttttttttgtaaaagatcagatagtaaatcttttcagcgtgaagagcatgaggtctctgtcacaaatactcaaccaccattacaacatgaaagcagccaacagacaacacatgacaaatgagtgtggctgtgttccagtaaatcttgattacaaaaacaggcaagaggccagagctgacccatgggccatagtttgctgaccccttctgtaaaggaaagtatttttgtttgacttgctgtttaccattgattgaacacaaggctctgtaaagttacttgttaacttgcagaagattgatgagtggcaagtaatttttattcaccagaatataaaattatttctgttcagtagaaaagataaaccaactgtgatattatggtcctgggggtgtctgtctaccatgtgctcgcagttctgtaataaatgttctctcaagatccttaaaatctcttggaaattataaaaatattggaaagagaagaacagtttttaaaatatatatatatatatatattttttttgagatggagtcttgctctgtcgtccaggctggagtgcagtggcgcaaacttggttcaccacaacctctgcctcccgggttcaagcgattcttctgcctcagcctcctgagtagctgggactacaggcgcccgccaccacgcccagctaatttttgtatttttagtagagacgaggttttactatgttggctaggctggtctcaaactcctgaccttgtgatctgcccgccttggcctcccaaagtgctgggattacaggtgtgagccactgcacctggccagttttttaaatatatttttaaaaacacttgaataagagtcagtgtaaactagaagtttaaaaatgcttcacagaacacccagggtttacattacaagattctcacaacaaacctattgtaaaggtgagtaaggcatgttattacagagaaaagtttgggagcaaaactgtaaaaaattatatttttgttgtattttctaagagaaagagtattgttatgttctcctaacctctgttgattactactttaagtgatttccttgagagcacatgatgatccgccgttcatagaaaactgaaagcaataagatgactaggtaagcatgacatttaaaaggtattcatgggacgtggttacaaaaccaactcacaactaaaaagtcttaggacctctcgctgacttaggagcctgatcccaactctgagaatgactcagtgtgttaccctgtggctagtgtagaccaatgatcctgtctcagagtcactagccaacagcccatatcaagtacttgaaactttgactcagaaacctcagtgtcagaacctttgacctaggaaccacctgtagtggttaactgcaatttgcaccccttagttcagggctttacaacaccgggggcggggaggggaaaggcatananctgatgacctaaaggaaacccattgcagcaacgcttttgtgttaagtgtacaaataagtgttgttttagaatcctccaggtaatgcctttgttatttaatgtgtctgagacaattctgcacattaaagaatataaaatattaccttgtaattccaatttgaaatgtgtaattgacattagacttctatttgaatttgaaatgtctaaaacaatgtggttaagtttgtaaaaggtgtgtgaattttgagtctgatttactacatttttttttaattttctttttttttggagttttagggattgcttagatggctagaaagattttattcatcagatttttaagtctgccttggcaggcacttgcagtgtttgaaagaatcagatatatcaaatttgtagtttaaaatatttaagggaactcaattaactatgctagaaaagagaattaagtatttaggaggatttaatatggtgtgaaagttgtgaaaatcaaaatggagacactaatgttaagaaaaccctgataaatggaaccagggaaaggcatgaagatagagttctcacacttgtatccctgatcatgaaaaagatctgcgggtttttccgcgtttttacccgaaatcttcaagggatgggaaaaagaaaattgctaaaaaatctcggttttttggttttaacagatatttacaccntggatcccatttattatgttgtccccaaggttttcggtgggttcccaatcagttagcccccctccacagtgaaagcactttactttatcaccttcacctaaagcataaaatccagctcttgaaagctgctccttgttaactgaatatatccacatcccaaaagtaatgatccatgcttcataatctgccacggatggatggatggatggatggatggatggatggatggatgaatggatggattgatttcttggaggatttgttgaatttgggaaattccacgccaggacagctggcccaaactgcccgcgacaatctgctcggtacaaggggagggtcctggagagggtgcggcccgagccccagtttggaaatgccaacttggctctgcagccgggccttagccacttgggtctggcgtccctccattattagcgccatgccggctcggggtgctgccaagtccctgagagcacaagcccgcgctcaagaaaagctgaagtgtgaatgttctgtctaccttcacagtaaatgctaagagaatgacccaagagcagagggtatcactctgctacggaggattgattgtaactggctctcctgccttagcaagaaatgccagaaccatggtcattcaagttcttgaccaaaaactgccttcatgagaatcaacttccccaagaaaaaaaaagcagaaacaggcaaagcttccagcatggtaggtaatactgacccttcttccctccttcctttggagattcacacagtaataatgcataaagctttgccaatggactaagcactgcccaggggtttttgtcatgcctggactgaaatgctctttttgcgttatcatagaatcccagtgcagtctgagtagactctaagcaaaagggacatttttcaaaaaggctttaaattgctagtacaaagaaggcaacaaaacttgcgtaactgtggacagattaactcacttggtgttttggctcttcagttttcccttggctgcgaagtactcctgaagctttctctgcggctcttcctgcaagcaggcaagcaaaaaaacgactgaactttatttcgagatgaagagccgctaacttgctgtagtgataaggaatgaactaaggctagggacatattaacatccgctggtggtgactctttagcctagatcttaccccactcctgctccttccatatggttcggtctcaggctcactaccgatcaatggcgtactaaaagcactaactatagactccaacacgtctgtcgtgtgtttcacgacaagccgtggagttaatccctctgacagtagctcagataaggatgggctatcatgggcccggaactggggcatgacgctcgtcaccaacgcatgagctccccaagtatgctatacctgtccctatgaagggcttccaactctatgtgcagtccccatgtggagagtcaggtattgattgatcaagccaggggtgtggtgaatggggagcttcctacaggggtaatgataattgaaatgcacggtgatggggattttcatattggtctcctaaggagataacagattggatgcggggtcgatattccactgcccagggtgtgtaccgagggtatctgcaggtggatctcctccccacgtttgattaatactcctgtcttgggaagcatagacgggcgggggaaatgatgaagggtgaccactccccgggaacgcagtgctctgtacgatggccttgattgcgaattcctgcagggggggggcaagagatttaatattcattccatcttcatttggaagatgaaaaattggggaccagagaggggaggggactgggccaagttttcaaagaaaagtcagtaggaattgtgaattcctgggggccggggcccattagtgctgttttggatcagtaaatggagatgtgagtttcaacagtaacagggacattttaaaattaaaatgatttaacctttagaaaatgtcctattttgtaataatgatggattcacaggaaggtacaaagaaatgtccagagagttcntgagcccccttcagccagcttcttccaatgttaacatcttgcattattatagtacaacatcaaaactgggaaatcgatattggtactgtccagatagcttactcagattttgccagttatacttccactcatttgtgtgtgtgtgtgtgtgtgtgtgtgtgtgtgtgtgtgtgtagctctatgcaattttatgtgtgtagcttcatgtaaccaccacaatcacaatacttaactatgccctcatcacaagactctctcttgctatgctttacagctgtatcctcttcatctccaaaccctaagcccacctcaccgcctccaccatctctaatccctggcaaccactattctgtgctccatctctgtaattaattgtgttaattaatgttatacaaatggaatcatgaagtatgtgtcctttgagattgggctgttaatttttcactcagcacaatttccgtgagtctaatccaacttgtgtgtagcagtaattctttccttattattgctgaataatatgccatggtatggatgtatcacagtgtgtctaatcctttgcccattgaaaggaatttggataatttccaggttttggctattatgaataaagtgaacataagacatgtgtgtacaaattttggtgtgatcaaaagtctcatttctctgggataaatgcccggtaatgaaatggctgggttgtgtggggcaagaacacaggcgcgtattataaccttactaccaagacctgaacccatataaaggtttatgcgtaacaatcatcatccctgttccagaagattacacgtacgaccacgcctggctcaccgactcacgtgggccagtaccagaaattctcccaaacaaacagtcgtgtctgaaaacaatcgcggtgacctccacggttagaaaagcctgttttcaagtcctggaattgccacatattagctgggtaactttgggcatcacatttactctctccgaatttcagattgcaaaaactcattggattgttttgtggattgaaagaaataatgtaaatttaggccgagtgctttgacttacgcctgtaatcctatcactttgggaggccaaagcaggagggtcacttgagctcaggaatttgagaccacctctggcaacatagtgagatcctgtctctacaaaaaattttttttaaattatccagcatggtggtacacgcctgtattcccagctactcaggagactgaggtgtgaggattgctagaacctgggagatcaagtcaacagtgagccgtggttgtgccactgccctccaacctcagtgacagaggaagaccctgtctcaaaaaaaaaaaaaaaagtagtaagtttaaagaacttagtgtaggcctggcatataaatgatattgttgatgttgatgttagcttgaaggcacatttataggagtagggattttataacattatgagcctgagagcacatataatgttcccggtctaacatgctccaactgaagaaaccccacacttgtccggcaaggaaactactacagatttcctgacctactgtgcaattcggggcatgcgacgggactgtgtttctgggtacgctgtctcaggttcgtctgggatgtaagaattcaacttcagtagttctctcatagacgccgacgagaggggcgtctcttttctctgatgaatctgccagatcttccacttcatagagtctaaatcctccgattcgatctactggagacccccacgttacaaaaacgtctaacgtcggtgacagctccccacatagggaaagatcacctgagtctcactacctcacattagtgctatctccagccccatgctatctacgagatggtcacgcgaggtttaaggggtctccgattccggtggtccgattcagctaatcgtggccctacgtgaacgatcactcctgctcgtaacatcgatacagggtcgcgctgacaaatggtactacgtaggttctcaggtcaatgccgcgtcacgaatgagcctaactaccccataagtgcacgtactgtgttacctttcctgttcggccaaacctgctactgtatgctgtgcttgtttaggctccatgtgctctagcctgattatcttttcaagtgttttatttgctaatctataaggcccctttcgtaaaatgttcactcattttctaattagatattttttttaatgttgagttttgagagttctttagatattttagatacaagtccattgtcaaatatgtgatttacaaatattttctctcaatctgtaatttagttttcatcctcttaacagggtcttttggagagcaaataatttgattttcataaggttcaaattattaattttttcttgtatagttcacacttctagtgttaagtctaaaaactgtgccttgtcataggtaccaaaggttttctccagttttttttctagaagtttagagtttcatgttttacattggagtccatgatccattgttaattaatttttgtatataggtagatgtttaggtttagggtttttttaaaaaaaaattacatatgtttaattgctccagttccctttcattgaaaagggtatccttcctccattgaattgcctttgtcagaaattaattggacatatttgtgtgagtctatttctgggctctttatcatgttacttttaaaaaatgcatcagttcctccaccaatacctcattgtcttgattattgcagttatatagtaagccttagcattaggaaaagtgtttttcctgctttattctttntcaaaaaatttttggatattctagggcctttacatataaattttaaaataactttgtctatgtctaaccgaaagccttatgaagattttgataagaattgcattatgcctatacattaatttaaaaagaactgatgtctttattcagttgattctgctaatctatgaacatagcatctctctcaaagcatttagtctttctttaatttctgtcattaattttttaaaattttcatcctaaagattctgtatatgttttgttgaatttatgcttaagcatttcactttcttggtaacaattataaatgattttgtgttttttattccactagttcattttcagtgtgtagaaaagcaatgaatttttgtgtgttgatctttgttcctacatcttgcaacattattgaactcatttattagttctaggaggttttttcatttttcttgtagataccttgagattttctatatagacagtcatgttgtctgcaaacaggcacagttttatttcttccttttcaatctatatgcctttttttttttttttgccttattgcagtggctagaacttctagcactatgtcaaatagcattggtgaaagcagacatccttgttccttgtcttagaggaacatttggtctttaatcttggattgcggcgcctccttttctcttccaaaatttctcttgtctagttatttgtccagggaaatttgaaagctcacttactgtgcaagtcagcaggaaacaactgggtctgtgcacagcacctagcaaagttctgctctaggaattacactttggccctgaggtagatttctacaagaaccttaccttctaagcagcactggggttcatctttttcccagtcctcagagcccattttcactcctgagttctcccccacaaaggacattttcaacgttgagtttattactcaacagaaaatggaatgaagtccaagacctaaggagatagaaaggggaccagttatggcatcttctcaccccaggacaccttgctgcatgtctctagtgctgaacagaccactggccttgctctgtagtttgaaatgctcgctgcaaccagaaaggcaccaaggggccagaccatgctctcctgtctatcacgccttcaaagcagaatttcccaaaccttgagtcacagtgctaacacacggggtgccataacatttttgttgattttggcattttacaaaaataaaataaaaaagttaaaaatgcattgctctattcttggggctggcacactattgcctttggccaaatccggtccctgactgtttttttaaataaagttttattgaaacacaaccatgctcttgtgtacatattgtctcttggctgcttcgaagctacaatagtgttcgctttttaacacttacctaaaattactctgtaatccatggatccttaatttatttaaaaaactaatgttaatgagtagctttattttcctcccatctaatttaaggcccacagaacaccttcacttacctcaatcctctcccaacttacatgcttttaatgtcatatatgttaataccgtatacttttaaaactttctaaaatagcattattttatagcatgagtgttcatttacatttttgcatatatttagaattttctttgctcttcgtttcttcttctatttatgactcccctctgggatcattttccttctacttgaagtacatagtttagaactgcactattcaatacagtagccactagccatgtgtagctattgaagtttaaactaagtaaaattgagtaatattaaaaactcagttccttcatctcactagccacatttcaagtgctcagcagccacgtgcgactaatgactactgtacatcaaacatatagaacatttccatcatggcaaagagctctattgatagtgttcatccagagtttctgttccaggaccaaactgagggttgggctgctatttctcatggcccaataacaagatgcagatgagctggggaggaagagagtttttatttctgcnaccatttaccgggagaaggcctggaaatcatcaccaggccaactcaaaattattacgttttccagagcttatataccttctaagctatatgtctacgtgtaagtgtgcattcacctgaagacgttagtgattaacttcttttaatctgtaactaaggtctgagtccggaagatcttcccctggagcctcagtaaatttacttaatctaaatgggtccaggtgctggggtaattacccttatcttgtcccctgctaaatcatggaggtttggggattcctttagagcaccaataaacttgtttgtggaggcctgggggtttcttctgacccacaataaaacttgtttaatcctaaatgggtcctgttaagaattccttctttattttgtcatattttaaggcccagaaaaggcctgggcaaaactcttgatgggcttttgttacattccagcctttgtataagaacactggtttttaatatttaacttaaccatttagtcagtactgaaacagttgttatagagatctgcattagtgagacctggcctgccacatttccttttctgaagatcttatggtagtgatcacctttgtgaaaggaaaataaatcttgggacctcaaaatcactaagccaaagaaaaaagtcaagctgggaagaatctgacacttaaatccaacactgctaactcattcatctcactcattcattcattttattttcttttttctttctttttttttttttttttttgaaacgaagtcttgctctgtcacccaagctggagtgcagtggatctcaggtcactgcaacctccacctcccgggttcaagcgattctcctacctcagactcctgagtagctggaattacaggcacctgccaccacgcctggctaatttttatatttttagtagagacggggtttcaccatgttcatcaggctggtctcgaactcctgacctcgtgatccgcacccccctcggccttgtttgcttgaggtactgtctaaatgctggaactgaaaatggcaagcaagacatccctacccttgaggaaactgtaatctagtcggaaatacagatgtcaaccaagtctcacacaagaanattgtacaaaacccctaggaggaaaaacctatcaccgcctcctatggaacttaaaacaaaaagaaaagtaacaaaggaaatgaatatttcattctggaagaacattgaaaaagaacaggaagaagagaaagcacaactcgaactgtccactagaattgacaacactctgacagaatgtctgaacctcatcgaaggggtaagtgaaaaaaataagctcctccagctttggcccaaagtcttataatttttaaacatattcctaaatataatataggagagatagccttcatctaagtagaaatttagctactcttgtaaatacagagtaataataataatgacatgcccataaacagtgtcttttgtgtatctgtgcttttataagcacttagctaagattatctcacataattatcataaccactgttactatgaccactttacaaacaaaactgaggcacaaagaagttggaaaactaatccaaacaaactggctccaaaaggaactttgctttctttgggtatcaagttctgaagagtacacatttaacattgaaactgaggtcagaaggcaagtttctatgtaaagttggagtattctgaatactctgggtagctacaaatagtatttaaattttatcttggattctgcagataaggataaaatagatggtaggcaaagagtatgatccttaggagaaatttttcctgaaggaaaaatatattaataaaaaatgatggaataaacttctaagatccttgcctagagcaaaactcattcagtcctttggctggtaatgttgaacatcaacaaaaaaaaggaaaagttcagtttaagtctactccaggcaacattttcacaacatccagttaaatattaactatttctctttgtggaattgaactagagttctttttcttatcctcttttttggttgttgtattatttaaaaatgagtacctttttattattgaaatcatttcaagtaatgcagataaatgatcagccctctccctgtacaaacatacatacttaggcatcccaaacttctctctggaggtgaccaccattgccagtcattcattctgttttcatgcatgtccatacagtataggtatgtcgagaaatgaagtattatatttttgtgagttgcaattcttttattcacatttttgtgtactttggttgtcttttcttgtgttttcctagtaccaatgttatgctgacttaggcagatgagttgagtattttcctttttgccctataaactgaaaatagtttgtatgacatgagaattatttttattttttgaaggtttgataaaaacttgcccataaaaatcgtctggaccggtttcttgaggatgcctgtgttagagcccgctttaacctgggctaccaatggttcgtcaagttctagattctctattaatacctttttcttgtgtctttctctggtctgttttcagccccgagtctcttagatctgtcctctaatattcctattgactttacttcattttctaagtctttatccttttgctttactttccgagagacctgcttaaccttatctcccaactcttttattgaatttcatttcttttactatatattttttactttgaatacacctctctcttcctcacattttcccccatagtattttgtcttcaattgacagttctactatcttattactctggagatattaataatagtttttaaatttttatttatttttattttcaaaacagtgtcttactctgtcactcacgctggagtgcagtggtgtgatcatggatcactgcagccttgatctctgagctcaagctatcctcctgcttcagcctcccaagtagctggaaccacaggcatgtgtcaccatacccagctaatttttttgtttttgaggtggagtctcactctgtagcccggtctggagtgcagtggtgcaatctgggctcacagcaacctctgcctcctgggtcctggttcaagcaattctcctgcctcagcctcctgagtagctgggattacagaaacacactaccatgcccagctaatttttgtatttttgtagagacagggtttcaccatgttggccaggctggtcttgaactcctgaccttgtgatctgcccaccttggcctcccaaagtgctgggattacaggcgtgagccactgcacccggccactaatttttaaattgttaataaagacgaggtcttgctatgttgcccagtatggtcttgaactcctgggcttaagtaatcctcctgcctcagcctcccaaagtgttgggattacaggtgtgagccactgaatctgacattttttaaaagttttcttctctttaccaagtcttttttcccctttctgcttttttgggttgttttattttgatctctatcttgctagaaactttctgcagacgtttagtaatactagatttttgagagtgggcaactggaaagctgattggaaactctgaatacatgggtgaggcttgttggctgtgagtgtcattgcttgatgtcctggcaaggccaatgggtttgggacccctactattagtataggcctgattccctgggaaaggctcttttgatctcctgcctggaggataaaggcctggctaccagccttctgtgtgtaatgtgagggagaagggctggagtattcaacatcatgctgaatcctttcaatgatcatcttgtttttagtaatctcctaccttaactctctgtcttctgctagtatgggaaagatgacctgaaaatctaaccatttatttttcccccattaatatcattttatgattattcagaagttaaataattgtcatgctgtcctccaaaaagactgaatcaactagcaacaaataagaattttctcacagctctgccagcattttaaaagaatagctttattgagcccaggaggtcaaggctgcagtgagctgtgattacaccactctaccccagcctgggtgacagagcaaaaccctgtctcaaaaaagaaatttaaggaacagctttattgttgtaaaatagacatacaataaacagagcacatatttaaattgtgcaacttatactttgatataaccctgtgaaaacatcaccacaatcaagatagtgaatatatttatcacctcctgatacagtttagctctgtgtccccacctaagtctcatgttgaattgtaatccccaatgctgggggaggggctttgtgggaggtgattgaattgtgggggtgcacttcccccttgctgttcttgagatagtgaatgagctctcatgagctccccttcactcactctctttcctgctgccatgtgaggatgtgcttgcctcttctttgcccttctgccatgatgtgtttcctgagtcctccctaaccatgcctcctgtacagcttgcagaactgtgagtcagttaaatctcttttcttcataaattacccagtctcaggtggctctttatagcagtgtgaaaaggaactaatatacctcctaagttacctcaagcttgtttttaattccttctcctcccttccttcattgccaagcaaacaaccacctgttttctgtcactatagattagtttacattttgtgggttttttttttttttgagacaaggtctgactctgttgcacaggagcagagcagcgtatccgcgttataggagatgcgaacttaagaaatgatgataaggagactttattaaatataattttgaattattttgccattacagaaattctaattatttaaaattctattcataatttttaatcactgtacttcccaagcttagcttagaatccttctgtgctgaggattaattttaatttgtcttttataggccttatctaaaatccaagaataattgccagaatcaaccaccttctaaatctgtaagtagaaattagtctttttaaaaatatgcattcataagtatgattagtaataaaaataataaagatgttagcaacctaaagaacatgtatttgaaaggtatttcttacagatataaaaacagtttggtttaataagagacaatcattttttgaaaagtatgacattttttgaaaagtagtttagttttattaaccaagaaaagcctcaagtgaactttagtcctcttgatagctaacatttattgaatgcttactgtgtgcctgatacttttctgacttgcattacctcactgagtcctcacaatcttatgaggctactattagtagccccactttacagatgagcaaactaagtcacagaaaggttaaataggtcgtatagctattaagtgacaaagctgagagcctgtgatcttaaccactttggtatgctgccatgaagttaaatagctcagtagtcattaaaagagaacatttgcattgaaccttccaagccacttaacaagtatatgcttcctaatcaatttaatttagctacattagatagaatggtaaaggatccttaacttaaagtttaaatggaagaaattagccctctgaaagaggcacagattattcatctgcaataaaaatctcacctttagttttttaaaacatagtttttatctgtgttctgaaatgtaactaaaacagtgcttcctgaagtgaaaaattctcactggtgagaattttaataagttttaatgattcaccaaatcacttcagtcatatttcagtcatatgcatatgcatatatagacatataagtttttatctgtgttctgaaatgtaactaaaatagtgcttcctgaagtgaaaaattctcactggtgagaattttaataagttttaatgattcaccaaatcacttcagtcatatttcagtcatatgcatatgcatatgtagacatatatatgttgtatgtatacatgacatcattagacactgtgaaggatagcaaaatgtatataaggcaaaatttatgaacaatggtttaacgtttgggaagcactgggttacacttttactttatgcagattgaaccagtatagtatgcaagtcttaaggaaaaatctactggaaagggccctcattcagacttcccagaggcttctctggaagttgacaatactgacttcagtacatcagctcgtaaatgaggatgatacctaccttatctgctttacacagttgtaaaagtaaaaagtgaactcaggaagggaattacagaatttaggagaaactaaaagcacgatgtaaataatagtcatcattacagttatataatgcttgacaatttatataacactttcgatacatgacaacaataactaacacccagacatgtttatatacattacctcactcagaacaaccatgtgaggaagttggccatatgctttaatgtccaaaccaggacacttttgagagtaaaaagcagtactctttgaccaacaggcataaatcaaaactatcttgtgaaaaccgggatatatggcatccttcctagataatagatacttttactattattaattttgctgtgaatctaaacctgctctaaaaaagttaattttaaaaagtaatgaagtactgatacatgctacaacatgggtaaatcttgaaaacgttatgctaagtgaaagaagccagacagaaaaggccacatattacatgattccatttatatgacacatctaaaataggcacatctatagacatacagagacagaaagtagactagcggttgccaagaactgcagggagcagaagatggggagtgactgccaatangaaaacgcattacgttgaatcgcaatgatatgtgccactttgcactctctgtgacatatataattatttttaatgcattcatttttttctcagagtgcattcgtttgaaaacatagacgggaaatactggtagtcttccttgtcagttagaaacacccaaacaatgaaaaatgaaaaagttgcacaaatagtctctaaaaacaatgaaactattgcctgaggaattgaagtttaaaaagaagcacataagcaacaacaaggataatcctagaaaaccagttctgctgactgggtgatttcacttctctttgcttcctcatctggattggcatattcctaatatcccctccagaactattttccctgtttgtactaaactgtgtatatcatctgtgtttgtacatagacattaatctgcacttgtgatcatggttttagaaatcatcaagcctaggtcagcaccttttagcttcctgagcaatgtgaaatacaactttatgaggatcatcaaatacgaattcatcctgaatgacgccctcaatcaaagtataattcgagccaatgatcagtacctcacggctgctgcattacataatctggatgaagcaggtacattaaaatggcaccagacatttctgtcatcctcccctcctttcatttacttatttatttatttcaatctttctgcttgcaaaaaacatacctcttcagagttctgggttgcacaattcttccagaatagcttgaaacacagcacccccataaaaatcccaagccagggcagaaggttcaactaaatctggaagttccacaagagagaagtttcctatctttgagagtaaagggttgtgcacaaagctagctgatgtactacctctttggttctttcagacattcttaccctcaattttaaaactgaggaaactgtcagacatattaaatgatttactcagatttacccagaagccaatgaagaacaatcactctcctttaaaaagtctgttgatcaaactcacaagtaacaccaaaccaggaagatctttattatctctgataacatatttgtgaggcaaaacctccaataagctacaaatatggcttaaaggatgaagtttagtgtccaaaaacttttatcacacacatccaattttcatggcggacatgttttagtttcaacagtatacatattttcaaaggtccagagaggcaattttgcaataaacaagcaagactttttctgattggatgcacttcagctaacatgctttcaactctacatttacaaattattttgtgttctatttttctacttaatattatttctgcaattttcccaatattgacatcgtgtatgtatttgccatttttaatatcactagacaattcaatcaggttgctacgttggtcccttgggtttactctaaatagcttgattgcaaatatctttgtatatattattgttttttctcctatcttgtaatttctttgagcacatcccaaagaggaatgcctagatcaatgggcacaaataatttgacagctcttattaaacattattctgtaagtaaaaactgaactacttttcagtatcactagcaacatatgagtgtatcagcttcctaaacccctccatgttaggtcattatgaacttatgatctaacaaattacagggtcttatcccactaatgaaattataagagattcaacacttattcagccccgaaggattcattcaacgtagaaaattctaagaacattaaccaagtatttacctgcctagtgagtgtggaagacattgtgaaggacacaaagatgtatagaattccattcctgacttccaggtatttacaccataggtggggacctaactacacacacacacacacacacacacacacacacacacacacacaccatgcacacacaatctacatcaacacttgattttatacaaatacaatgaatttactttctttttggttcttctcttcaccagtgaaatttgacatgggtgcttataagtcatcaaaggatgatgctaaaattaccgtgattctaagaatctcaaaaactcaattgtttgtgactgcgcaagaagaaaaccacccatgctgctgaaagtcagttgtcctttgtctccaactttacttcctttacctctcatatgtttgtgaataagcccaataagcagacncctcctacaaagtgaacctggtctctttcctcctaacaggggtcttgtaacacaggtaagacgagttcaagttttatttcttgnttttagaacggtagtgagcggttttcagcntgagaccacacctaaggtaagtagctgaattggggttttgtcttggctaaagtttaacaaccagctggtcttaatttctccttaccattagagcactcagtaatcatataagttgtgtgatcattcattttgcttaactgtttgtttctgtttttattgctgtttcagtctttttcccattgggtttgacctactctatctgacttgatcaaatccaaaggaaatttccaaattatggggaatgaggcctctgaagtggctaaattcccaccctcccacacacacaaacgtggtatggtgggggaaaaaacggccagcaaaagaaaaaaaaaaaggaaaagatgtttcattttgaccaccaaacgggctttatttacataacaaggccacctttttgctagccaggccatactgaaagagcaatggctgttgccccatgctgtgggttccatagctaacgttctgccttttttcctaccacgacagcctgggtttggttcctaaatcaagccttttctggtttgatacttggtaatgctgaaatagcagcaatttgtcctagctgaaatatcgtaataagattttaaaagatttattttaaaggacctcaatagttaaaagtcagcttaattaaaagctaacatccaagatgtgtgcatgtgtatgtatgcgtctttgtatttaaatagccctcatgttttttttttctttcctaggaacttgcctttttttgagcaaaagtttttttcttctctgttgactggattctgttttcttcatttacttctgctgtctctcctttctcttgcaccgtctgctgcatgagagccctaaaatagtttataatagcctggggttccttaaagaaaatggagaaggtgccaggctcccttttagggagaaacttctatttttccttatggaatccctagagtgtaaacagacaagttcatttcagctcttaaactgcttgcgtttgtgttgtgttacctgatttttttgactattatatttttgactagctattgcaacagaagctactcttgggttttcaaggaagattgtagtttagacatgtagaaatgtcttttaaaaaaaaaacaaacttttttttaagtgcactgtaaaagcatcatatggtctagcctcctaataattttccctttttggagaccaggattcagggtgggctctgcccagagctcagagatccagttaaaagagaggtagtctcggccgggcgtagaggcccagcctgtaatcccagcactttgggaggccgaggcgggcggatcacgaggtcaggagatcgagaccatcctggccaacatggtgaaaccccgtctctactaaaaatacaaaaattagctgggtgtggtggcaggtgcctgtagtcccagccactcgggagactgaggaaagaggagaatcgtttgaacccgggaggcggagcttgcagtgagacgagatggcgccactgcactccagcctggcgacagtgagactccgtctcaaaaaaaaaaagataggtagactcgatgttgtcgtacccgagcaagttagagcaacgccacactttgagacgaatttaagagtcctttatcagccggcgaccaagagacggctaacgctcgaaattctctcggccccttggaaggggcttgattttcctttatgctttggtttaggaaggggaggggagctcagttgcaacaattctacaggagtaaaaacatgcaaagaaattaaaaagacaagtggttacagggaaacaaacagttccaggtgcaggggctctaaatctatcataagatgttaggtatgggggctctgccggacacaaactcaaggctttatgctgttatctcttgagcgaaatcctgggaacttcgtacattgcttgcttcagtaccttatcagttaatcggactctttgatatgttgggagtcagcgtacacaagttaactccttgaggaagggggtgggtaaggagtccttgatgtctggtaaatgaaggagcgaaatcgagttcctctggctttctcagctaagggagagcttattcatgtggaaacaaggctaagtgattaagggagaaagggagagtctgaaaacaaggttaggtattacaatgtcaataaaattggtctccttatacagtcctatggtagatttctttccatctttaatctccctctagcaccaccagactttttctctctgtaccttgagatgtaaattttgctatctgaattttcgtctaagagttgtttcctttaatatgcaaatttagggttatttagctgacaactgccaaagtagtgaaacaagttatcaagaacttgaacgtctaaggtaggaaaaaaaaaagtctttatgaatctataagatgtacttctattggcatgcctaatacgtctatgtatttacgtgttgtgtacacagtttttcactactgaaaatatatagaggagttctaattaattgacttaagacaataaaagcgcttgaatcaaataccttatcaggaaaaaggaaaagacaagtcaaatgcttgttcaagtctatataacttaagtaaaatctttaataaataagctagctttaacattatttgaaatgtcttaagaattgccagcaggttctgggttacagaactagtgggggtgcagtggggtgagggttggtggggtgggnggtnnnacnnnnncnccccccccccccccccccccccccccctccccccccgccccgngcgggccgcgcccccccccgcccccccggcccgccccccgcggccccccacccccccccccccccccccgcgccccgcccccccccccgcgccccccacccccccgcccccccgccccccccccccccccccaccccccacacccggcccacacgcaccccccaccccgacgcccccgcccccccccccccgcagccgacgccccccccccgcccgccccgccccgcacccccgaccccccccgccgccccgcccccgccccccccccccggccccccccccgccggcgcggcgccccaccccccccccccagccccgaccgcgcgccccccccaccccccccccagcccccgccccccgccccgacccggcagtacgctataattccctcttcaccttacctcatctgttctctgatggatgtacttttttttttagtttctaaattcccttttcctttgctctggagatgggtgattgatgtagtctgggtatttgttccctccaaatctcatgttgaaatgtaatccccagtgttggaggtagggcctggtgggaggtgtttggatcatgggggcagatccctcatgaatagcttggtactgtcctctcaatagtgaatgagttctcctgagatatggttgtttaaaagtgtgtggcactcccccattgctctcttgttactgctttcgacatgtgacatccctgctccccttcgctctctgccatgattgaaagtttcctaaggcttcgccaaaagctgagcagatgtgggtgccatgcttgtacagcctgcagaactgtgagccaaaataaacttcatttccatataaattacccagcctcagatatttctttatagcaacataagagtggcttaatacaggctgggcatggtggctcacgcctgtaatcccagcactgtgggaggctgaggggggtggaacatgaggtcaggagattgagaccaccggctaacacggtgaaactccatctctactaaaaatacaaaaaattagtcgggcgtggtggtgggcgcctgtagtcccagctactctggaggctgaggcaggagaatggcatgaacccgggaagcggagcttgcagtgagccgagattgcaccactgcactccagcctgggcgacaagagtgaaactccatttaaaaagaaaaaacaaaatttcaaacagaacaaaatgaaaaaaataccaagtgaaaggcccctataaaaacccctctggggcccatcctcccaccccctcaagtgaaaccacatttaacaatttggtgcatatctttccaaaccttttgttgtacacatataaaaaacatacatgctttgatttggctcagactgtacatagtgttttccctcttgcattttacacttaatatatctttgacatctttctatgtcagtgcatgttggctcgatgatattctatcattaaatacccttccaaaaatggtaaaatcattttaaaaaatcattcacacaagtacatatttacaattttaaaagaaaacagaatcccaaaacacaacgacaaacctctaaaaataatctctatctttccaccagcatggaacagttcattcctttttcacataaaacgaattatgtgattggaaagattaactctaatctacacatttatatacagaatgttctatttgttaagcctatctgaaaataaaaaattcagatgattaattcacttacacttagaaattaagtcaatatactatgaatacacattgtgatcagttataatatgatgcttcttagtctagggtttcaattaaataacagtaaaaaaaattggataaataagacagctaataactgaaaaatccagaaattcaaagattatattgccaactaaaacactgccatttacatttttttttcctacttggtagcaaatgctaatggaattcaatcctgattacttaaagtcagttcacatcacacattcaatcaggataatacgaacataatatgcctactatagcgttagattaagacataaaatttttttgcttgaaagtaatgactgcgtaccacttgagacatttgtcaaccacttcagcacattgtttacgagtgactggatgtccacaaggaataaaaacgacagcaatatttctatccatacagattttgcaaagcttctcctcttgcaggtgtcttagctgctcttcagtactaatctctttctgcaatgaagtctgacttgattcgtcttgtgtactgtctttctgagccttcactggatctgcaatcagaacctcaagtgatttacagttgctcccagatgtctgaattttttcctccattattttcttaatgtctttgaaactgaaccccattcatatagcttcttgtaccataggattatggaagatggtatcaatttttctagttagtgatggcgttttttcagcagttcttaccagacactcctcaagtgaatgggataaatgaatattgtttatatattttcgtgtcttctgttctaacagatatttacaccctggatgccattaacatgttgtcccaagggtcttnctgggctctttctccctttttacccccattttcgtagggatttggttaaaacccatgtaaaaaatccaaacaccggcggggaacgggggttcaagctcgtatccccaccactttgggaacccaaggtggcaggattgtcggaagccaggcatttgagcccacccttgggaaaaaaaagagaacccccattttttttgaacaaaaaccccaaccctcccaggaaagaaataagtatggctgggttgaagtcaccaaagatggccgactggctggtcaagtaactttacctgatggttcgtagaatatttaccttcacccaggtgggagaattgcttgagccaaccctcagtgtggattcaggaacttgatttaattggtatcgtgattgtggattagattctcagggatgcattcactaagtaaaagtgataatagctacttttaagtaaaataatgaatgaatcaaacactctaaatccatggtgctatgctaagctctttctgtattttatctcatttgatattacaaatatttgatgtgttaatagtaatgactatctccatttttacaagtaaggaaactgacattgagagattaaaagactagcacaaatcacaaagtaaatgagatttgaatccggtcttgattccaaactctacagtattctaaattcaaggagactaaattataagatggagagccaattttactttataacagggttagaatggcagaagagacctgacattcacacctctagccagtgcatcatcttcctgtaggcaaatatgcaggaaatctataataagaacgtcctttggtgaaggccaggtgcaggggcttacacttgtaattccagcactttgggaggtcaaggtgggagggtcgcttgatgacaggagtttgagaacagcctgggcaacatagtgagaccctgtctctacaaacaaaaacaaacacaaaacaacttcaagaaaactcctttggtatggatcagaacaagatgaattatctatctgatccaaatgcttaatgacattaagccacagtccactcactgccacaatagagatatacctgccaatgccactcaggtaatcccatcaaaagtggtaatgaggtctgcagcatgacttgttcttagtgatcccagcctgagaccttgagattgcagcattttattctacatatgcacaaaacatctgttgaaaaatcttctaaattgatgcaatacattcgtatcaagaatacctgtctgtaatctccataaaccctctcctttctgttttaaaaaatagtaacagcatttctccttacatgacaaagaaatgacttcaccatctacgaaatagtgaataggagctgtgtggaaggaaattagctctacttcttggtggagatgagaagggagtgttcctctgaaaatcaaggctcttgtcatgctaggagccaaagtcgttttttagagtgtggacagttgagaagataagacagggaccatccactcatgtttttcttattccataggcctctctcaattgggcaaagcactccagaccttttggaagagtgacaccaaaggcaagcacctgcttggcaggcccctcagcttctacgcaagtataagtgagtatataaaatgggggtacttgtgctgttgagtaccttatttccaaatgaggcctgccggtgtccctgtggctgtgagaaggcctctactggataggtggaagttgtgtgttctcatcttttctaaccctggattgacttgcccaaaaggaagccattattaacactataataaaaccatccttaatctgggactctcttcatgcagtggttcttaaccagtgataaacatgagagttacttttggagcttaaaaaaattaagatgctcaaggtctacccaaactgactgaatctccagaggtgaggcccagggatgtatacttttgagccagacctcagtttaccctgcagagctcataaggttgcataacaccctttgtcagccactctgatgaaaagaaaaattggtgaggaataagttttagagaagaaggagcaaaggtgttcttggccagtgagagccaatgacagggaaatgcaaacaatgtatccacaagaaaggtaaattaccctatagagcattttaggataaatgaacatctcatgcctagggttgagagagggtacaaaaaaaaaaaaaaaaaagaccactctggatacacaacgcgataaatggaataaagaattttttccttgtaaattaaaaaaatcctttgttactgaggtataatttaatctattttatgtatagttcaatgaggtgttatagataataaattttttttgtaaattattatattgtcatatactcatacattcatttttaaaagtcagaaatgtatataaccattaaacttataaatcattcagtcattcagagatatagatacacgagcatattttatatccaccacaataattattaccatctcaacaattccatcacccctcaaatttcaagcgtaggggtttttaaatgtcaaaggagtctactcagtgggaagaaagttaaggaaaaaacctttggggctttgggctccttccccctggggttaaaaaggcaggaaattgggcttaccccccctgaaattgggaactgaaattttgggaagtttaaaaaaaaaaaaatcaagcagccttccttccttggcttcccaaattgttgggattacaggcatgagtcaggattcctggcttagtttacattttctagagttttgtataaatggaaacatacagaatgtatttttttgcggagtgggggagtgtttctatttctttctttccattttcccccccccncccccccgagacggagtctcgctctgtctgttgcccaggctggagtgcagtggtgcgatctcggctcaccgcaagctccacctcccgggttcaagcaattctcctgcctcagcctcctgagtagctgggattacaggcgcccgccaccacacctggctaattttttttgtatttttggtagagacggggtttcaccatgttagccaggatggtctcgatctcctgacctcgtgatctgcccgcttcggcctccctaagtgctgggattacaggcgtgagccaccgtgcccggcccaagtgtttctatttcttaaccagctttcatgcaatctttttttattttaccatctctgtgatcccactcccaaaggtactagatgtcgattggtccttaggatcagctaccatttgcccaactgctttccagccttccaaaaatttttttctttttttcttaaagatactcctgtgtgaggctcagaactcttgaattgctactgcaaatatgaactcggtgatgtgaatgccagggaattgcctgattgatcaaagaaatgtatccccttctccctcactcttgctgtcttctcatttgttttccccatccttgtggattcgtgaatttaaatatccctttaatgttataatattttaatggcgtttggcgaaaagtacagaattaggtgcaagagtgcatagctgttattttttttttggcctctgagactgttcatatatgcaagttatttaacagaaagttctgcagtgacctgagatgtcaggggggtctgatagagtacgtttgaaggcagttactggaaaaaaataatgccatttctggtttgtacttcggtaagttcagatgacccaatatattgtttacatgtggcattcagtaaaaaagtagcttcccctccctttcttcttccttttctcctttcctgcttctataaagcatctgctttgggaaacttcttaggaggagagcttgccagcccgtgggtaatggagaggtcttgcagagataaaagagatgctcccactcaatgcaggatggtgtggaggtaaatggggatacgtctggcatcactcaggaatgggccttcctggcagggaaaaaaagggaggggaaagaggaagggaattcnnanatnaattgctgaatacggggattccatggcctggatccaggaagagaactttgggaggtgtgaacctggaaggcatcanctgatgaggagcagcctgaactccggggaggacctgtttttggtggcccggaaaaaaatgccttccacacacagggaggccacccggctgatgggctgggggttggacggacagccctaggacaggcttgggaaaccaggctcaggtagggcctgcgaggttctcgctgcgtctctttccttcctggtcttagaaaatagaatccaaggcctcttgagagtggaaggtgggttgggaggagggcagatggggcttaggcccaggacacccgtagagctactgcccagctgtctctcagggactctgctgaggtcactccaaggatcattcttagccttgctagacagtactgacagagggaaccgtagtatcgcacccacttccttctctttcaatgaaagtttaaaggtcaccatttcctctggcaaaggaagttccacaaatattccatttccggtcttagaaacagcaaggtatcaagcaattgcaaacttcctgtgctggggaattcccaaggaagtaggggcagagttctggtggagacaaagtgaattccgagtgattagtcagtagcagtagcagtagcagtagcagtagcagtagcagtagcagtagcagtagcagtagcagtagcagcagcagaaccagaatttccccgcacgtgtctcaggctctcatttgccaactcagtctctaagtatttttattggcaggaaaaataaaatagctatgagtgaaataattcattagacctgagcctccatcaattttgtgtttaaaggcctgactctctttacctttccctgggatggaagatgcaaatgttcctgatctcactgtcaaaaaagaagaaccagtgggtatattgtatgcttgagttccagccattagtcacaagacatagagatgactgccatgtgtgtagactttctatagactgtgtgctaaacccgacctgccacttccaaggagtagatgaggaatgtccatggttctggggagccctaccccaatttggggcagacattccaaagctcattttctgtggagggggttgatggttaaaggaacggctgggatttactcttctttctagggccaagaaaatgacatgctgcctccatgtttaatcatccttccccctgttaataactatggctttaagtccccggttagggccttcctccaaaattggggaaaaaaattcccctccccccctaaaaattttttttttaaaaaaacctttttttttgggggttgggaaaaaaaccaaaaattttttttccccaggggttttttaatttaaatttctccccaaaaatttgtttttttttttccgcgaaaaaaagacccccccaaaaaaaaaaagttttttggcggaaaaaaaaatattttttttgtgttaagaaatggagaagaaggggggttttttttttcttctccccccacccgccaaaggaaaggttgttcacagattgttttgtgtctcccgcccatatgtgcctgcgaaatcatccttccagaaatatttgcccctttcttttgttatagagtggcactgccctatatggtgaccacttgccacatgtggctgttgaacacttgaaattggcttgtcagaattgcagtgtaaagtgtaaaacacataccaaatttcaaagacatggcacataataaaaaatgtaaaatatctcattaacaatttttatattgactgtgtaagtaacattttgaatatattggattaaatacatggatgatgccccaacacccacagtcccttatcaagtctctacttcacatttttgtacttctgacttagaaatagcactggcgtctaagagcctattaatgtcgtcaataggttcttgggaaccacaattttaaacaaaatgacatataagaaaacgaataacattgaacaaaatgacattattcgaggacctgctgcatgttgtttcacttaaagtcagtgtccaagaaactatcagtgacatttagtgaggaattgctgtccttcctgtttacaggaacctgggcaagttacttaattcctctaagcccggtttatatccctgcaaagagagaaggataataatcaccagtacttagtgatgtcgtaaggagaaaataaaataataaatatgaaatggctgacagtgtccttgtcacacagaagatgtgtgatccacagtagctgctattgtctgcctcacttcactagtaatggtccagggaggcctttaatgtgcatggtgcagtacattcacatgttggacatgggtgaagggaaagaccaggctcatctaaacacaataggatgcttgtggtgttttgaggaggaatcaaggactagttatccacagctgtaacatgcatggatcaaaagagataaggcacacaaaagactttgtcagtagcaaagcattacaaaatgcagagaccagctgtgggtggtggtgagtcagacccagcttccctctgtgcctggctgagtggttctgggcaagtcacgccatctgtcttgatgcccttccccatctatagagagggagcaactgaggccccttccaatactgaagtcctttatttctgctactttagaaatatccacatttttggtaaattcaaatgatccaatgattccatttcctaatgttcaaaactagccccagaaacatctaaatgaatcaaacaaataaaatatttattgtgtatgttttgattgctgaaacttctattttagcaacacacacacacacacacagaacccataagccttcatctttccttggataaacgagccttcctgtctggccatttaagtcacgattaagtaaatgatttccaactcgccttttgcagcagttcagatgggtctttcctgcgtggcagtggccctcctgacttatgatttcctgtgtgtcggcctgttaccactgcagcttaactgaggaaacaagaacaaaacagcctctgaccccaagagactgttggaggcaaaggcttcagtcccaagaacctcacacgtggggagcccgagagcccagccctgaccttttctccagtaataacataagaaacaacaggcactggccttattttggatacaaagagtggtgcttttccttaaatcttcctttagtcaggggtaccccttcatggacgccccaacatccatggttcctgcttgagtccctgcttccatattcctgcacttctcacttgaaatatccctggagtacgttaagcagccaggtttggaagttcttgctgtgcaggcgggtgtgtgcatgtcctctctctcaacaggacacaagctccccaaatcagacggtatgcctccacgccccttcccaagcctccccagcagcaccgagcatgtgaggggagctggggcccaggccatgatgggaagcactctctgcctaaagactagggtgatgcgccctcaactgtgggaatgagccccagctctggtgtctgcctcggtttttcctcctggacaatcaacatgaactcctcacccctcttatccactttgcataaactgaaaataacaaacccagggtctttctgtcacaggaaagggtttttttttataagattaaacagagatgattcaacacacccaggatataacacatgggccatgagtcaaggccaggcattgctctggtcagcctgttgtttgggcccccttggcagggctctcccctgaatcttccccctcttgactccccatcaccacagcacgtccagctttgggtacaaggccagtaaatggggaagggggtcagatgacataaagagccctttcctgtcccattgaaatatatttggataacagatggcatttccccctgtgtcttgcccagggcccagagcctccacttgctagaggcagacagaggatggagagccccttcattagtgggaggacatcacaggtgggcaagaaaccacaagcttgcactgaggcccagccttgaaatagcagcacctgccggcacctgtggtctggggacagggtcacaggatggaggggcctcctaagccttttatctctatgtactaagtacaacccattttcccacctcacagagccagatcagcctctgtgaggtcctggtggcaaaaggataattgcctgcccgcctgcccgcggtggggtgcttgtgcttgcattcctgggaaggttgttgggttactctgcaataggtctctctgaccagctcaccctcctactgcaaacctcaaaccaacttcaaagaagatccagcacccgcgtagtctaaagactgagtctgaagctgtcccttcctgctatggacttcagattttagcccacttgaattgctccatatcctccaagccatggccatcccttgactctctgggctcccaagcacttgctgccttcatcacacagtttgagttaaggcagaaagactggtttccatgtacactttgtggaagctttctcatttctttatataatctctgtcctttgtctactgctttaaaatctagaaattgtttacaaacacaaaggtgatcctttaaaagctcaaagctgattgtgtcaccaatatataccactcttaatggcttcccattaaactttgagtaaagactttatggagcctacataaggccatgactacctggctcttattttcctcctcatcctcatctcaccaactcactctccactcctatacccctcactccttccccctcctctctctgagctccagactcccaattacctacttccaccctttttgacccccagggacttatctcagcctggaattttccctctttgctctccactgaactgtccactcccagtctaagacatgtgcttatgtcacacgcccttaccgtgcttatctcagtttgtaattatctactcatttagaaaagtgttgatgaaggtcttcactgtcagctttcaggatagcaggaatcatagctgattttacttacttaacggggtttcattctttgtaactttttttttttttgagatggagactcactcttgcccaggctggagtgcaatggcatgatctcggctcactgcaacctccacctcctgggttcaagtgattctcctgcttcagcctcccgagtagctgggattacagatgcctgtcaccacgcccagctaattttttgtattttttgtaaagacggggtttcatcatgttggccaggctggtctcgatctcctgacctcaggcgatccacccacctcagcctcccaaagtgctgtgattacaggcatgagccacggcacccagccactccttttttacttatgggtgagaagccattagagatcatttcttcttttctttctctcttcactaaggcaccagggtcactaagtagtaggatactttgaactagaactcaagaaattgagttttaattttacctcacactctcatatgaattctccatgtgacctcgggccatacttcccctgtaccctgtttcctcttttataaaagtaagagtttaaactagatggtctccgacatgcatccttctctaacatattctggaaccttcaataaactaagataaagcagaataattaaaacttaatttaaaagaacacaggaaaggaagcagttacattaagcaaaagagacatcttcatggttgaagaagtgtatgccctggtgtctggatcccatttaggaaacttggtaaccttgcaatcttgggcagattgcttaatttctctagaccatgacttcctcttctgtaagatgtgataagaacatctacctcacaggtttcatgagaggattaaatgagataatgtattataatcccttgaacatggtaggctgttatgttaagtcctttcctccttctctgtagctatcatggaatttaaaaacacattataactagagcatgagttgcgactaaaggctcaattgtctctgcatgtgttggctcatgcatgctttattcctctgaagagcttttataccaagtgaaaggaaataattgcatttccctgaaaattcacaggaaaaagttatgtttttctcttcattcaagtgattctgttagacccaaccacatgcaacaattttaaagttgcttccaaatatatttacaaatatttcctgtcttcaaggaacaatggcaagaccatgactcaggttcacatccggattccaccactaaccatgtacccaattacttcagtcaccttcattcaggtcttacatatcacagaataaaatcagatttcatcagaggaggtgaagacagggagaggagatatttcaatcccttctccgcaacccccgttttttttttttttttaacaaggatcctagagttactgaatgatagcacgtttgagggggaaagaccctaaggatgatctttataagccatcacttggtgttggtggtgataaaaaactcgagtatctttatgcagtggaaagagaagattggactcggaatcagaagcttgagttcaagcactggtttcatcagtcttgtgatcttgggttggtcacttaacctcttcaagggtcctcagctgtgaaagaagatagtatcagctaattcttgtatgtgcagtgaggaggcagtgagatagtgcaggtaaactataaaacaattgtcacatgaaacgcatcacagtgattctttggacccacaagctccaatcttataaaacatatccagtcacccaccaacatagatcatctcaccttgcatatctgattttgtggatcatggggaaaaactgctgattcctagcaaaacccatggcataggataagtgcacaataatttttttttcctaaatgatttagatgacagtgactcattaagggtttcctgaggcctcctcagagtcgagaggtgggtgcctgaagccacccaaagtccctgtcacaggatggctcccaacgcacacaccacaggcctgcccagtatgttccactatctacccagtagagccctgcccagtacgttccactgtcccttccctagaagaggtgactgttgttcacagtcccagaaaagcgggctccccaaaacaatgcaaggacccacctctctctgaacctcacccaccctagttttcctttaaaaatcaatttacaagaagatcatgtgaaggaaaaggttgggtgatattctaacccaagttagctgtttctcaaccaagttctctttgaaaaattcaacaaccacctttggggaattatttacaacagaggagtgaggatgggaccaggataggtattgcctatgttggtggaaccagggtttttttcctggattaccaaagagatggtatgcattgctcccagaagctaaatatcttcaggctttcaatggtggccttcacctgaaaatgttatccctgttgaagctttcaagccagtattttcataagaactatattttctttggtgaactgaggcattataatgatgactatacaggttcttgagtgactgaagccatcattagcattgtcattatttttgtttagttgcatctccatagcagctcacattcacaatgtgctttgcaattgttccttagcaatagccctcacaagattctcaggaggagagggttaatccggattaacatttctgtgaagcctagcgagattaatcgcaagagttttaaaattaagtaaggacgccgggaaacaaatcaatcccagcaaacattttgttgggatttatcattcaagcaattttacagttatccctgtcaaatacattaagtgttcaaaattgggcatagggggaacaaaataataaacccagccaaaacagaataatccctgtttgttcaatgttggataaaaaagacattactattggtgtaaggaaattagatacatcttccattatttagtaaaattaccataacttctaactttgtggctttaggcagtctagtccacaggcaggaaggaggtttgttttggcaaatgactgttatcatcttctgtttcaaagctaaaccataaactaagttcctcccaaagttaattcagcatatgcccaggaatgaacaaggacagcctggacgttagaagcaaaatggagtcaggtaggtcagatcttcttcactgtctcagtgatggcagtttcataactttaaatgatggctatcacagttttcataaataatctagataaacagttaaaataaaataattaggtaaatgtagtgcgataaatattagtagacaaactcaccataatttagaatctaaagttaaattaaataataatatttcattatttggtattttccaagaaaaacatattgtaggaaaccattctttttaaaaaaaaaagtgtccttttaaaaaggtgaataatttttgtctaattcaaagtttattgaaaagttatgtataaaacaaggtaaaaggaacaaggaaataagggaaatgtaaagaaaattatagaaataaagtggtattttttggtaagaaagcttaaagagaaataattttaggtaagaaagaatcttacctaaaattttgtgctagaataaagtgactggctaagaaagggatgttcaaagctatttatgacaaacccacagccaatatcatactgaatgggcaaaagctggaaacattccctttgagaactggcacaagacaaggatgtcctctctcaccactcctattcaacatagtatcggaagttctggccagggcaatcaagcaagagaaagaaataaagggtattcaaataggaagagaggaagtcaaattttctccgtttgcagatgcatgattgcatatttagaaaaccccatcatttcagccccaaaactccttaagctgataagcaacttcagcaaagtctcaggatacaaaatcaatgtgcaaaaatcacaggcattcctatacaccaataatagactaacagagagccaaatcatgagtgaactcccattcacaattgctacaaagagaataaaatacctgggaatacaacttacaatggacatgaaagaccttttcagggtgaactgcaaaccactgctcaaggaaataagagaggaaacaagcaaatggaaaaacattccatgcttatggataggaagaatcaatatcgtgaaaatggccatactgcccaagtaatttatagattcaatgctatccccatcaagctaccattgactttcttcacagaattagaaaaaactaatagccaagacaatcctaagcaaaaagaacaaagctggaggcattgtgctacctgacttcaaactatactacaaggctgcagtaaccaaaacagcatggtactggtaccaaaacagatatatagaccaaaagaacagaacagaggcctcagatataacaccacacatctacaaccatctgatctttgacaaacctaacaaaaataagcaatggggaaaataattccctatttaataaatgatgttgggaaaactggttagccatatgctgaaaactgaaactggaccccttccttacaacttatacaaaaatcaactcaagatggattaaagatttaaacatggctgggcatggtggctcacgcctgtaatcccagcactttgggaggccgagatgggtggatcatgaggtcaggagatggagaccatcctgactaacacagtgaaaccctgtctctactaaaaaatacaaaaaattagctgggcatggtggtgggcgcctgtagtcccagctacttgggaggctgaggcaggagaatggtgtgaaaccaggaggtggagcttgcagggagtggagatcacgccactgcactccagcctgggcaacagagtaagactccatctcaaaaaaaaaaaaaaaaaaaaaaagaaggatttaaacataagacctaaaaccataaaaaccatagaagaaaacctaggcaataccattcaggacataggcatgagcaaagacttcatgattagaacaccaaaagcaattgcaacaaaagccaattgacaaatgggatctaattaaactgaagagcttctgcacagcaaaagaaactattgtcagagtgaacaggcaacctacagaataggagaaaattttttcaatctatccatctgacaaagggctaatatccagaatctacaaggaatttaaacaaatttgcaagaaaaaaaaacccatcaaaaagtgggcaaaagatatgaacagacacatctcagaagaagacatttatgtggccaacaaacatgaaaaaaagctcatcatcactggtcattagagaaatgcaaattgaaaccacaatgagataccatctcatgccagttagaatggcgattattaaaaagtcaggaaacaacagatgctggagaggatgtggagaaataggaatgcttttacactgttggtgggagtgtcagttagttcaaccattgtggaagacagtgtggcaattcctcaaggatctggaaccagaaataccatttgacccagcaatcccattactgggtatatacctaaaggattagaaatcattctattgtaaagacacatgcacatgtatgtttattgcagcactattcacaatagcaaagacttgggaacaaccctaatgcccaccaatgatagactgtgtaaaaaaatgtggacgtataccccatggaatactatgcagccataaaaaagaatgagttcattcttttgcacggaactggatgaagctggaagccatcattctcagcaaactaacacaggaacagaaaaccaaacactgcatgttctcactcataagtgggagttgaacaatgagaacacatggacacagggaggggaatgtcacacaccagggcctgtcaggaggtggggggcaaggggagggataacattaggaaaaatacctaatatagatgacgggttaatgggtgcagcaaaccaccatggcacatgtacacctacgtaataaacctccatgttcttcacatgtatcccagaacgtaaagtaaaatttaaaaaagaaagaaagaaagaaaaggatgttcacgacaaaccagaaagtccaagcatgtcatgaatagtctgtgtaagtcacaataagaggatttatttaaaaaaacttttatatgataaagttgtctataattaaagggaaattataatggtctttctagagattgggttgatgttaaaaaactacttatatattaaaaaattggttagaacaatgaaattttcttacggggttgattcactcttaataaattataagagacttaagaatttttttttaacccaaagttcagcttttattgcatcttgctgttttaggttttctctcccctttaaaagggtgggaaatagtaatgccctccttcaactcccttcagctcatatacgttttttaccctcagattctgtttgttgtgtcctgatgctaacaatgttttcttaaaggtctaaaggaaatgttttcttccaacataatattctgtgcattgcagaaggtcttttcttttgccttttggtaactggcttaacagattttatgttttattgaaataatttctatgccattattattaagttttggtttgcttagaaaacactgagattaatacaattttttaaaaattatgattattacatccatatatctttatgtatgtgcttttaaagtccttgtgacattgagttctagggcttgactcctgggtcttaaaaggacaagtcctgctaaatcttaaatactgacagcaattaaaggctcatcttcaggactggtagaaaatgccaatcaaaataaactgcattcttgaaacacagagccagaaattaaagctattcaactcaaggcccaggaactatagtggaagaggtgggtgtgtgagattgtaagggccaattttgagagataaaataagttcaatttctctataaattaatcataatcattgatgtccaagccacactgatgcaagatcagcatatgggtcctgtgtcagattaacaaggttttcttgaagcattaacctactccttaataaaggttatagaggttataaaaggcttctggaagttatagctatggtcaagataaaaatttcatagattgttaatacaattttggaaaacaaatttaattggcttcttgctgtttttattagggcttattgtttggaaaattaagtctcgtctctcaaagaatgaaggctttcaccttttttttttttttttttaatccttgagttatcactttggtcaaatgaatgacttattttacaatgacctttcatcaagtgttttaaacctttcaaatttgacaaactttccaaaatcaaactacaaattatgtctttttatgacctaatgaatcctttaaaatactaggttccctaaagtccaaaaaaaaaaaaaaataacataatgtggcttatttggtataaaaattttacaagaaacattgtcaaatataaaatattgtgtggttttgtttgggctgtatttgtataaatatgttattggtatgtgttccaaaattataggaaactcctataattctgatatgacttggtgtacattatcagtaataattataattgttatggtaaattattgtgtgccatggaggtaacaaatttcctcatcaagtgtgtctttgactatggttgccctaaaactttttgccattcacagacaattgtcttgctttggtcctctttagaaggtggttttataatcagctataaaactctaacgggtgctcttgaatgcaggcttaagatagctttggagactgtgacatcagaatagaggaaaaactttcagtattcatggagtgctgaaatattcatgaatatcaagcaaaacaggaattaacttcatagatggaactaaaagaatgctgaagtaatctttttgactttttttcttagaatgttgatccttcgttttgtttttcagagtcnaggaaatttttctgttgagatattgacagctttaacaattaagtatactccagtgaacacaatttggagcaatctagtcattccccagcctgaccaattcaatggcccccatcttagttaaaattcctcaccctgacaaggccccatctacgcctctgacctcatgccctccactctcagtcttgcactcaccctgccacactcaagggcttccccaggttccttcttagattccaccgatagctcagggactttgcacatgctacggtctctgcctggctcctccccagatcttctcatgcctagctgcttctcatcagcacccctcagagactgtccctgccccacctctccaggttccatacctgccaccctcccccaatcacgtaacagtttcttcacagagcgagttaccatcccagtatttccctaacttattttttgtgactggtctgttgcctgtctccaccacaagaacataagctgcatgtgaacaggagccttgtctatcttgtcaccccagtggctgtgacataacctgatacacattagatgctcaatgatgtttgatgaatgaagtgctggtagtccaactgtgtttccttgtctgtgtaagtatgtctgttgtggtttcctaagaacctacagctctcccactgtgactcctgttctatggtcctgatttgctggactagaatcctaacctacatgcttactcttagtgtcctcccccagaggctgaatcccagtccctaaacctccaccaaatggctaagacctagcttccaaccagacaggcctacgctgagacctcagcaccgcccttctgcggtctcatccttaacgcatccttcagggcccagcttaaatgtctcttctccaaggaaggctatcctctttctgcccctcagtgctctccatgcctcctctatgcctccatgcctgctttcaaccctgcagaagtggagaaattgctaatctgctgtgttgacactgtgctggggtgccttgggccagggagcaggctggtggtgtgctgatagcccgtggctgtgcccaggtccatgctcacttcctgagccccagtggagtaggctccctttcccttattgcagcactcagaggaaggacgtgcttcttaggacagatctggccaacctctccctcgtgagagaaggcccagccatcctcttgccctctttctttctcctgcccccgagtaataaaggtgcctggtcagagccttctagaaggagacccaaacatccaccacacattcccagttccaaccgtcatccacatggctggctgtgcaggtaaacgcagagtctgtttcacacacccaaccatctagtattggatgggaggacagtagcgtgacactcttctccagccttgagccctactgtgggccccacccaacccagataccagaggagccctgtactgggatgctattggatgcttgtccagtcatgtacaaagttagccctttgttatatagagttagctacgtacatcttcctctgtagggaacccaagaggggagaagagatatgtagtaggatttaacctgcaaatcctctgctgagcaccctgcactacatacagtgggtagcatgtggtaggtgctcaataactattgaccgatagattgaatacaggtaggatggtgacacaatctaagatcccaggggtggggagaccacacgcttggttagggagacccaaagtggaccgtgtggccagaagagtcccgcactgcactctagtgacagtgcagaaagtcactgtgggaaatctagaagtttctacaggttgctatttcatcatagcactgtgcaggccaacccttcctgctccactggctgttgggaaaagctttctcttttcttcctagccagggagctctcaaagtgttccactctctcacctccacccaggcgtccaggtgtggaggacacttgccggctgcttgtctgctgactcatcccttggtttcacttggaaaacctaccaccagctggcctctttccaagcatcagcctcctcattttcttaatcccttaggtgtgatctcacctccacacagtagattgcctcaaggcccaattccaatatgaataaaaatgattattttgtcatcttccaatcttccttttaaaatattattttataattccctttaggaggatcacctaagtgaagactatttttacctaagaaatgttaaaatgtaaagacatggttgtaatctggggattcctgttaaaatggctagcagacagaagtcagacgacaggctagaaatgtgtgaagagtggttgcctttgaaaggcggagttggtaatgattttcttccatttttccatgctttccaattctctacaaaggccttaatattacttcgataaccaggacctctgataacctgcccccaccgagtaaagacttagctgggaaagtcagcttcatgtgaggtaaaaggaaccaggtaatacacaattcccactgccaactgtcgggtgtgcaggcctgagcttcctgcatgtgggaggaaagagaaagaagagagaaactccaagatccaagagatccagcaagaaggctggagtctgaggacgcagaaagctgaatggcacagttaccactattgtgctgaggttctgtggcctctgggtctcttgacaactgggcaaagacccacagaaaactatctctagaccctacctgtgggaggggaaagtgcttaagatcatttacaggacagccacctggacctcaaatggcttacagttccttcatccagagggtcttcatttagtacataccaggtgctaagctgggtgctggagacatgacggggaacccatttaccatggctttgttactgtgacattcacatctagggaaagccagcaaaggggagggatcgaggagagcttgttaggcagagaaaatacccaagggcaagggagaagccagcctgttctgagcacacacagtggttccatctaactgggcctcagtgccaggttggactggagatggggctgaggagctgtcacagagcattctggacacagatgtcacatagtcccttgaggttagggtccttaggcatggcagcattgctttgagtttttccttttgtaatgttgccattcatgacaatgtggaagatgggtccttgcagagaagggcagggctgtgagaccagttaggagactaagatgtgagccaaggaaaatgaggaacacctgaacactggggcaggtgcagggcccagagagaagcagatggcttcctgaggttttaagtaggtagaatcaaggcagctggtacagatcttttattacatataaactggaataagccatctgttccaagacaaaagagtaggcggaaaacaatacaagacagaaatggaattagaacaaacctgggaggaatgtggaattagagtagagagtccaacactggctgcaatcataaaaatgtaaaacaaacaaaaatttgctaggtgtgcttacttagaaataattagctgtcatattaagttcacttgtgttatggcttaaatgtgtcccccaaaatgtgatgtgttggaaacttgatccccaatgcaacagagttgagagatgggacctttaaaaggtgattaggtcataagggttctgccctcataaatgaattaatactgttatcatgagagtagattcctgataaaaggatgatctctgcctcctccccacagccctcttgtgcatgctttcctgcctttccaccttctgctatgggatgacacagcaagaaggccctcaccaaatgcagctccttgatcttggactttccagcctccaaaactgtaagccaaacaaatttctgtttattataaattacccagtctcaggtattctgttctagaaacacaaaatggactaagatcattaaattatcattttttatcagactgttgaaaaatataacagagagtaagaggaaaattaccttctttctttttcctttccctgcctgaccttattcacctcccatcccagagcatccatttattccattgatctttactgacatctattatctgacctacacaatactagacattaggacaatgtggcctgcctccaagaaactcaaataagccaactgagatcagagaggattaatcacctgccaatgggcacaaagcaacaagctgggagccaagtcccaaaatggggcctgctgcttccagttcccctctctctgcattgatgtcagcattatccttcgtcccagtcctgtctccactaccactttccccctcaaacacacacacacacaacagccttagatgttttctccactgataagtaggtgactcaatttgtaagtatataatccaagaccttctattcccaagtagaatttatgtgcctgcctgtgcttttctacctggatcaagtgatgtctacagagtagggcagtagcttcattcatgaactcattcaacaagcattattcactgagagccttgtatttttcaggcatagtgccaacagcagtgtggacagtggtgcatcaaagcctctagtctcatagaacttagtcttctggaggatatggaaaacagacaacccaaacaaccaacaaaagagcaagatgctgcaaaaaaaaaaaaaatgaatagggtgctaagatagagaaaagtgggagagtgctatttagacaaagtggtaaaaacaaagccccttgtgagatgagagctgccgacaggagggggcgggtcatggttgtgggtttttgggtaggacattcagaggagggggcgggtcgtggttgtgggtttttgggtaggacattcagaggagggggcgggtcgtggttgtgggtttttgggtaggacattcagaggagggggcgggtcgtggttgtgggtttttgggacattcaaaagagtctgaatgcacccaggcctacaacttcaagatggtaaaggacagctccaaggatcagaagaagcatgcttggaactggggcattttgagaaggaggaaaaatatgcagagactagtgcttgcagagcttgcatgtggatttcatttgaggtacaatgaaaacccattaatgggtttcacacagtgcaatggcctgacctcacttatatttcctaaaatagaaaacagatcagaaggaaggcaatagagaagcagaaagtccaatgaggaggtttcacagcagtcatgggggtggggtaaggaaaagaagtggaaagaaacagacagaattgggttatattttggagatagaaccaacagaaggaagaggagaaacaacatttactgagaagggaaaaagtaggagaggaataggtttgggaaataaatcctgctgacattggaaaccccaaggaagcctcaaaagtatatttacttgctttagatttaaaagaataggaaagaagcatctcaacttggaatttgaaatctatttttccataaaagtattgttaaattctactcatactcacaagaaaagtacattctaaagagtatattgaaagagtttactgatatacttaggaattttgtgtgtatgtgtgtgtgtgtatgcgtgtgtgtgtgtttaaccttcaattgttgacttaaatactgagataaatgtcatctaaatgctaaattgatttcccaaaggtatgatttgttcacttggagatcaaaatgtttagggggcttagaatcactgtagtgctcagatttgatgcaaaatgtcttaggcctatgttgaaggcaggacagaaacaatgtttccctcctacctgcctggatacagtaagatactagtgtcactgacaatcttcataactaatttagatctctctccaatcaactaaggaaatcaactcttattaatagactgggccacacatctactaggcatgtaataaatgcttgctgaatgaacaaatgaatgaagagcctatagcatcatgttacagccatagtcctaaagtgctgtttctcatgaaggccaaatgctaagggattgagcttcagtcctttttctaacatcttgttctctaacagaattctcttcttttcttcataggagatgcctgagatacccaaaaccatcacaggtagtgagaccaacctcctcttcttctgggaaactcacggcactaagaactatttcacatcagttgcccatccaaacttgtttattgccacaaagcaagactactgggtgtgcttggcaggggggccaccctctatcactgactttcagatactggaaaaccaggcgtaggtctggagtctcacttgtctcacttgtgcagtgttgacagttcatatgtaccatgtacatgaagaagctaaatcctttactgttagtcatttgctgagcatgtantgagccttgtaattctaaatgaatgtttacactctttgtaagagtggaaccaacactaacatataatgttgttatttaaagaacaccctatattttgcatagtaccaatcattttaattattattcttcataacaattttaggaggaccagagctactgactatggctaccaaaaagactctacccatattacagatgggcaaattaaggcataagaaaactaagaaatatgcacaatagcagttgaaacaagaagccacagacctaggatttcatgatttcatttcaactgtttgccttctacttttaagttgctgatgaactcttaatcaaatagcataagtttctgggacctcagttttatcattttcaaaatggagggaataatacctaagccttcctgccgcaacagttttttatgctaatcagggaggtcattttggtaaaatacttcttgaagccgagcctcaagatgaaggcaaagcacgaaatgttattttttaattattatttatatatgtatttataaatatatttaagataattataatatactatatttatgggaaccccttcatcctctgagtgtgaccaggcatcctccacaatagcagacagtgttttctgggataagtaagtttgatttcattaatacagggcattttggtccaagttgtgcttatcccatagccaggaaactctgcattctagtacttgggagacctgtaatcatataataaatgtacattaattaccttgagccagtaattggtccgatctttgactcttttgccattaaacttacctgggcattcttgtttcattcaattccacctgcaatcaagtcctacaagctaaaattagatgaactcaactttgacaaccatgagaccactgttatcaaaactttcttttctggaatgtaatcaatgtttcttctaggttctaaaaattgtgatcagaccataatgttacattattatcaacaatagtgattgatagagtgttatcagtcataactaaataaagcttgcaacaaaattctctgacacatagttattcattgccttaatcattattttactgcatggtaattagggacaaatggtaaatgtttacataaataattgtatttagtgttactttataaaatcaaaccaagattttatatttttttctcctctttgttagctgccagtatgcataaatggcattaagaatgataatatttccgggttcacttaaagctcacattacacatacacaaaacatgtgttcccatctttatacaaactcacacatacagagctacattaaaaacaactaataggccaggcacggtggctcagacctgtaatcccagcactttgggaggccaaggtgggaagatcacttgaggtcaggagttcaagaccagcctaggcaacatagtgagatctcatctctacaaaaaaaaaatgaaaaattaaaaaatgagctggacatggtagtacacacctgtagtcccagctactcgggaggcttgaggtgggaggatcacttgagcctgggagatggaggctgcagtgagccataatcacaccattgcaccccaacctgggcaacagagtgagacccagtctcaaaagataaatttttaaaaatgttaaaaaatatataaaagagaattttaaaagaacaactaatagatcaaagcatggatgcaagatatatttagttggaaaatcaaggttaaaatcaagggatcttggaattaggtgtggtagatttgggtaaggagtagtctaagatgaccctgtttcttggtactggagactggatgagtggcagcgtcttaaccatatttttggtagaaatatggaggtcttctccattccaggatgaatgatgagtaaaattttaggcatgtaatttgagctactagaaggacactcaattgcagatgtacaatggggagatgataacctatctggaactcagaaaaataactgtatatagatatgaaagacatcagtaggtatgtagtagataaaatcctaaaagtgatgtcaaagggagaagagaagtatatggtgaacactgttgtttgtccatgcaattgccatctcttcttcttccttactgacagaaccctgatttcactgagaagtcaacatgcccttccccaattgatgaatccaattggttgaagattatgttcattctattcttacatgactaagtcacgttgacttaatcctatcaaatgagatgtcgatctggaaacaacttctggaaaagattttctaccttgataaaataaagagccatatagatggtcctttatcttccttcttccttgaatgagatatgttctatgaggaagtgaagcttagaactgtggtcagcaacttgcaacgactgggaagtcagagccacacaatgaagaatgcagagtggaaggagaaaaagagccagcatctctgacaacattgttacaccgagaacctacctccagattttaagaaaacaagaaatgctactgttattaagccatttcactgggtttgctatgacttgcagtcaaatctagcttaactgatacagagcaccacagagaactggtctctcatttgtctcatcctgttctttctagcagccacgactttcctagggtttccttagcccaagtctggctagagcaagactaagtaagacttgattccttaatgtccttttgttttaagaaatattaaagaattatttttatattaatatattttaagaaataaggaaatacaaaacactgagcaagcaacacaaattcaagaaatcttaaaaagtataatagctgctcagtctctgattaacagtgaaatatggaatcattgtagaaatggccttggagcgttattctcccaggccagctatccttatggtctgccccacctccctcattgcctaaacagtaagagagtcccatggtgagactcaacagtcttagcacagaacttgttacagtctatttcttttcttacagtcctatatatcaattccaaatcaatgagagtaaagcccaatccctgcctttaaacccaaaggacagaagcccaaagcccaaagatattccctaaccttctccccctcctgtcgctccctatgtttaaagctggggatctctttttcctgtgtctaattattttcctcattggcttgaaaaatctgataaaacattttaggactgtgtataaaatagaattagccaagtgcaatgtctttattcagaagaaatttcatggacgttgtgcctactctcttggcttcctggcttcatggctttccagatcccacagtaagctctggatagtagaagttatagtaagactgacttctaaataaatgaagtgactttaaccttactgatatggcttaaagaaaaggagtggcctttaagatccatgaacttctcaaacaaaagtgataacgttatctccatgcatatataatactaaatataatgcaactgagagaagtaggctgtggtaagaaaggagacccaagtgccatctgaaggcagcacttaccactctgcttcatcccaccgaggaaacaaagcatgagtattgccagattttcttctgtttcaagaaaagccagaaatccaggtttttgcgtgaaatgtcctgattttaatgttgggaactaatttatattttgaaataacattgtgtgggacaagtgaacttgtatgtggaactgctttctcccagtggcgaccagtttggaccgttgatactcagcaagttcagccaagtgcgccttgtcattgtcagtcatcaaggtgatgtgtgattggtcaaacaattagttttgctcagcatctcgtgtgttttcaaaggacctgagggttcatttgcccatgcagatcttgtagtcctgtttattctattaatttatcttgcaaatctataatgttttattttaagcagcgagagccgtggcagcctttggtctggaccctttctaatgatcatttagtatcaggctatgtgggagttgattgttttgcattgcctgaaagccaacagtatcactcctcctctaggtgtggcagagatgtgagagagggagactgacagtctgtgggtgtgtatgcagtgttgggggaagcgaggcacaggggacaatactgtggtgtataaaactagtctaaggtagcatcaggaagttcatgaagccaaaatgattttcataacagcacaagacattatttgtttttgcctccctctcatttttttttttttttgagacagagtcttgctctgtcatccatgctcgtgtgcagtggtgcaatctcggctcactgcaacctccacctccagggttcaagcaattctcatgcctcagcctcctgagtagctgattacaggtctgcaccaccccgccggctagtttttgtatttttagtagagatggggttttgtaatgttggccaggctgccctgtcattttttttttactagtgtccagtggagttttttaggggctacataacatgatactgtcattaatctaatggctaatgaaagggatatgtatatgtttttgtgtttaaaacaaacttctttggggtcctcaataatttttaagagtataaaggggtcctgagatcaaagagtttgagttctgctggactgggacagtggttgtcaacccagattgtacattagggtcatctgggaagctttaaaatagtactgatgcccaaccttaccgcaaaccaattaagccagaatctctgtggatgagaagtcttcattgtcatcatcaccatgaccatcatcattgtcaccgtcactacaccattatcatcatcatcatatcatcttcattatcattgttagtatctccatcaccatcatcagcatcaccattattatcatcatcatcatccccaccatcatcctcatcggaacttcacctgcatggaggacaatccactatgcattaggtgctatgctatttgctatactccttattctcacaactgcccagagaggctgatattatctcactttataacaggaggaatctggatcggaaaagttaaggtaagctaattcacagagcgagaagagatagagccaggattcgaaaccagttctctgctacatcaatgttcccagtccttgcactattgagaacctctttagttatgctttcacccctccaacaccacagtaaattttttctttttttaaaaaaattatactttaagttatagggtatatgtgcataatgtgcaggtttgttacatatgtatacatgtgccatgttggtgtgctgcactcattaactcgtcatttacattaggtatatcttctaatgctatccctccccgctctccccaccccatgacaggccctggtgtgtgatgttccccaccctgtgtccaagtgttctcattgttcagttcccacctatgagtgagaacatgtggtgtttggttttctgtccttgtgatagtttgctcagaatgatggtttccagcttcatccacgtccctacaaaggatatgaactcatccttttttatggctgcatagtattccatggtgtatgtgtgccacattttcttaatccagtctatcattgctggacatttgggttggttccaagtctttgctattgtgaatagtgccacagtgaacattcatgtgcatgtgtctttatagcagcatgatttataatcctttgggtatatacccagtaatgggatggctgggtcaaatggtatttctagttctagatccttgaggaattgccacactgtctaccacaatggttgaattagtttatagccccaccaacagtgtaaaagcattcctatttctccacatcctctccagcacctgttgtttcgtgactttttagtgattgccattctaactggcaccacagtaaatttttatagattttataagcaaattgtatttactgtgcaagaattggtttattttttaaaccatgtgttgcaaacatacaatggttaattgtgatatttgctcagtacaagatcatcagatcactacacagacttgaggtaattccacctaaaagcaaagagaactgaccccacattaactgagaagtctttacttatttattccctataaacgagccaatatgaagagaaggccttaatgtggttaactatgtaatttttttctgactttttgaaatactgagaagagctcatgactctcccatctcctaattctaccttggtggattttagactgaccacaactcatgggtaaatgagggaagacgaataagaaaccttgcttttttttcctccttgtttttggctggctgcagtggctcacacctgtaatctcatcactttgggaggccaaggtgggaagatcacttgagctcaggatttcaaaactggcctgggcaacatagtgagaccccatctctaaaaaaaaaaaaaaaaaaaaaaaaggcgacaggcggtgcgtgcctgtaatcctacctactcaagaagccgaggtggaaagatcacttgagcatgggaggtcaaagctgcagtgaaccttgattgcaccacttcattccagcctgggtgacaaagcaggacgctgcctcaagaaaacaaaaacaaaaccttaattttttggctattcttttctggtaagaatggtatagagatggggatgaggatggctattgtatgagagagcaaacagggtccaagcagtgctctgggctgtctaaggaccagtagtcagcttaacttctcaaatttccagggaaggagttcggagtggtagaatatcctgggtatgcccaaagcatcaccttgcaaatagcctgtcatgaataatttgtttcatttgttatgactggaaactggctttgtgtatgccagagaatgggggcaggaaagagagattggtgtcttgagctctctgtgcctctggggcagtgatgcttttcctctcatgtggaaggagagcatgactgaaaaggtgcacaaataaggtgtctgtgagagaaattaaccttccagatacagagacacaaccttccccaagaggtcctcattgctctgccttttttccttttttttgcttgttctaccattaataacagaaactgattatgacctcaaaagagaggagaaagcgactctccccaccctagagctagttaaccaccatatcttcctagatatccttgagagcaatgtaacccgtgaactcgttttacctgtgtagcagaccaagccgcagacaaaatccntcagacaccaaattaaagaaggaagggctttattgggcctggagctgcggcaagactcacgtctccaacaaccgagctccccgagtgtgcaattcctgtcccttttaagggctcacaactctaaggcggtccacatgagagagtcgtgatagattgagcaagcagggggtatgtgactgggggctgcatgcacctgtagttagaatggaacagaacatgacagggatcttcacagtgcttttcttatgcaaataaccgattagatcaggggtcgatctttaccaggcccagggtgtgtcaccgggctgtctgcttgtggatttcatttctgccttttagttattacttctttctttggaggcagaaattgggcataagacaatatgaggggtggtctcctctcttacctgcggggagtgagctcaaactccttaaaggagttacctgccttccatcatcagggaagcaggaaatcttgccttccttgttggaagcaagtaaaactcaaaacaaacaaagaaaaaaacagggagttgtacagcaaaataaacttttgattttgaccaaattttgggagatcaggaattctctgaaggagatgctttcagacctcagcaaattgtcctgttggtttgagccataaagttagctcatgctggtaccaaacaccagtaggagatttgtcaaaggtaagaggcatctccactcagaatcccttcgtggttaccaacatgtgaaccttggaaatctgagacaggtctcagttaatttagaaagtttattttgccacggttgaggacacccacccatgacagagcatcaggaggtcctgaccacatgtgctcagggtggtctgagcacagcttggttttacacattttagggagacatgagacatcagtgaatatatgtaagatgtacactggttccctccagaaaggcagaacaacttgaagcagggagggagcttccaggtcacaggtaggtgagagacaaacaattgcattcttctgagtgtctgattagcctttccaaaggaggcaatcagatatgcatttatcacagtgagcagaggggtgactttgaatagaatgggaggcaggtttgccctaagcagttcccagcttgacttttccctttagcttagtgatttggaggccccaagatttattttccttctacatcactgtgggcagctgactaggaaagctttgtaggactggtgggcagtgtgagagcccagtggggggtggtggtcctgtgccaatggtagcaaccacctgtgaggctgagtaaactcatttcccaacctcctctagcagccccagtggagatacagaggaagcagactagcgatacaacccagcctgaagttttgtctggtgagtgtaatggaataaaaatgggaagggtgctgaagagaccagcaagaaaatggttgaagagatggggcacagaaattaagctggatcaaaaaggacggaaaagcagaaagggccgatagagagaggggatatctatgggttcgcgattctgaaaaggacaaatcactggtgctttgagaagagagagggtgagaaagcaggaaggctggaggctgtcatccaagaggcggacatctgtgaacatgattccaagagtcaccagaccatgggggtggccaaagggagtgcctcttctcacctcctactcttaattccttgtactcaagataataagttcccagaagagaagtacccatatttaattcatctgtgtcttcctagcagtactaaaaatattatatgaaaggtatcaaacctttgagaatgtgtgctgctaaattgttaaggatgctggaaaactcaagacgtccctgatcctgagcctgagtatgagcctgtggtgagcccaatgcaggtctccattcagacaaaggcctcagggaacggatgagacctagggacagagatgcatgctggagcagcattccccatccctactgcagctcaggccagctgactgctttatgagtaaacgttaccagggaacactttgcagtcttaacacacatgcccacctgtgaccactgatccctgttgggtgaccactgacatcagagattcgatggcagcaatgaagacaaggctatcctcattaggaaggaaaggaaggaggagggaggagggcaaacgaatctttcctgcttgtcaaccacgtccatctctgttaggtgatttcccatgtgtgactttgtttatctttataataactctgagaggtaggtcttgatgtccacattttgaacatgaggacatccagccaggaagttgagttctggggacatagctgagagggcaaagctacatataaacccctctttgttttttctggcttatccactgagtgccccctgcaatccaccagcccatttgtgaagtgcatactataggtaagttggcacaggaggagtggatgtgggcgattttgtcacagctctccaggaacttacacactggtgaggagggccaggtatgttcctgaccagtcacaatcaaagcaacctcctactaatcagggaggcttggtacctggggaatgctatgttgaaaggttcttttctgggttttaaaatgatgggtctatttccttattcttaagattgctttttttctggctagaacttaaaagaaattttcagtaaaatttcccttccctggcacaaagtgagcttgaaatgaattcccaggtggccttgatactttaaaatattgcctcctataaaatcaacctttagaagaaggaagtcaaagaacatgctagatttcacaaaggttaattccttgaaatccagttatctacaggacaatgttgtcaaagaaaaaattatttggccaggcacggcggctcatgcctataatcccagcactttgggaggctgaggcaggtgatcacctgaggtcaggagttcgagaccagcctggccaacatggtgaaaccccatctctactaaaaatacaaaaaaaattagccaggtgtggtggtgggcacctgtaatcccagctacacgggaggctgaggcaggagaatcgcttgaacccgggaggaggaagttgcagtgagccaagttcaagccactgcaccccagcctgggcaacagagcaagactttgtctccaaaaaaaaaaaaaattcaatgatatttttaaattcatggtaaggaagatttcattcagaaccagcacagaagatataggaaacactgcaatgggactttgcggtgggggagagagattgaacacaactacatatacagcacgggcaaggacatattcatagccaggaagcagagcaaagatcagtggatgcgaaattactaagaggaaacatgaaaaataagggagcttctgcctaaacccacctaaccggatccttgctgaagacaggacagggtgattggacaccactttggggatggtggaggatggggaatccagtgagatttcaagggtgatgcgatattgaacatacaaagttcttgctaaaaaaggattttacaagaaagtgtacaaatgtgcctgggacaaggtgcaggagcccgacggagatgtggtccagcagagaatatgtgccgagatgataggtgagttctctgacgaaggatatatgctgatccagccagggtgaaatgctcagagaaagcacggaggggctatgtccgttgccccagtctccacgcggtcaaatctgatcccgttgtgagtgtggccgtttgtagaaagcaatcagggggggtccctccccaatatatattttttatannatntgagacaggttctcactaggttgcccaggctggtcttgaattcctgccttcaagtgactctcccaccttagcctactgcatagctgggattacaggcacaaaccactgcatgcagctaactttgcttctcattccagcactttttattccactgattatatgtatatgtatatctgcatcatctctctctctctctctctctctctctctctatatatatatatatatatggaaatatctctctctctctctatatatatatatggaaatatatatctcagtctctcctatcctcctttaatcagttttgctatcctgtcaattcccccaacgagtgtgatgttgtgaaatatatatttgttcttcatctcctgtttcctgacatacagcttttaaaaacccttggaatctctggaataataagagtgtcttttgcatgctaatagatgactgctggctggcagccccaatgcagtagcttcatgatggggtttgtcacaggaaagaccaaggcaggattggagacttgagactgttagccccactccccaaccactggagggagtggaggggctgaaggttgtgtcagtcaccaatggccaatggttcggtcaatcatgtgtatgtaataaagccactcttaaaaacccaaaaaggacagggtttggaagggctcccagatagctggacacatgaaggttcctggagggtggtgccccagaggggcatggaagctccacaccccttctcacatgctttgctctgcgcatctcttcatctggtgttcatctgtatcctttgtaatatcttttagaataaactggtaaacttaagtgttttcctgagttctgtgagctgctctagcaaattcacggaacccgagggaagcaaacccagatttatagccatcagtcagaagcataggtgacaacctaccacttgtaactggcacctgaagtgggaggcagtcttgtgagactgagccctcaacctgtgggatctaacgctaactccaggtagatagtgttggagtgaattaggacacccaactggtgtcggctgctggaggactagtggtgggagaaatccccaagcatttcggtgactagaggtcacagaagaactcagtgttgaggtgttgtgacagtatggtagggaaaactgcgtctggttttttccttttacaatcagttaaatatttaacacaagtctactgtatattagtaaaagggttacattttttaatgtcttgacagttgcactttgacaacttccatatcaatcactttttttcgtgtccgtttggaaccaaaatcacttgggataccatgaaccaggctgcagcgtattccccaggccttgaaagcttggaggccattttgccagccntaatccctgtgaataccaggcttcgtggatttaaaaaatagacttgaggccaggcctggtggctcacacctgtaagcccagcactttgggaggcagaggcggatagatcacaaggttaggagttcgagaccagcgtggccaacatggtgaaaccccgtctctactaaatatacaaaaaaaaattagccgggcgtgatgttacacgccagtagtgccagatactcaggaggctgaggcaggagaaatacttgaacctgggaggcagaggttgaaatgagtcaagatcgtgccactgcactccagcttgggcgacagagtgagactcagttttcaggggagttaaaacaatacaaaaaaagaaaaagacttgaacaatgaggctccactggatggatttaggggaattacaggaagcaggacctgacggtgcaatgccacactccacctgtccagaattggacctcaccaagggaggtctgtggggacagggagaggccctctgcctccaccccctcctctactccccaaaccctgagtcaggctgaatgtagtaaacctggaacagaaaagttcagtttggcaataggtatctgaaggactccaggtgcttctcccttgattcaaaattttacttataaaaaaaattataagaaaattctacttaaaagaaataatcagggaggtacaacaaattgtacttttttttttttttttttttttttgaaatggagtctcactgttgcccatgctggagtacagtagtgtgatctcggctcactgcaacctccgcctcctaggttcaagtgattttcctacttcagcctcccaagtagctgcgattacaggtgtgtgccaccacacccggctaatttttgtatttttggtagagacggggtttcaccatgttaaccaagatggtctcgaactcctgacctcaggtgacccacctgcctcagactcccaaagtgttgggattacaggggtgagccactaagcccagccattgtacatattttgtgggtatttactaaaacattattcaaaatagtaaaaaaaaattgaaataaactggggactggttaaataattttgggtacaaccacatgatggaatactatacagccattaaaaattacattgaggccaggtgtggtggctcatgcttgtaatcttagcactttgggaggccaaagtgggaggattgcttggacccaggagctcaagaccagcttgggcaatgtggcaaaaccctgtctctaaaaaaaaaatacaaaaaaaattaaaaagctgggtgtggaggcacacacctctagtcccagctactcaaagggctaaggtgggaagatcacttgaaccggggaggtcaaggctgcagtgacccaaaatcgggtcattgcactccagcctgggcaacaaagcaagaccctgtctcaaaaaaaaaaaaaatacattgaagaatatcttacggtatggataaatattcattttacagtgatagatgcaaataaaagcaaattacaaaatatacagtttaattccaactttgatactacatatgtatatatgaatacatgcatatgttatgtatgtatatgtaaatataacaatatatgttctatatatggatattatatatttacacatacatacacacatatataatatcttctctagagagcagaaagagagtagacagataatgaagataggatacaactccagtccagctcaacctaggggacttgttttaaagcctcaggagagagaagttgggactagaaagcaaggcagctatttgtaagcatctttgtgtttcatgctattggggtgggaaacaacagcacaacttttgaaagcccctttctactcaccccacaaactgcagagcagctttaggaccctcagagttcaagaagaccatttgcagagtagaagaagtaaaaacatgtatgaacttgaccctgagctcatggactgtgccatgagggaaattcctaaaacagcaggagaggccctggaggaaggcagaggccctgcatcagcaagtccaggcaaaagcctgcattccatagatgctcatctctctggctggtgaggtctaaagacgtttggtctcaatattaagtctcgtgagagaggtcacaaacccagtcccttggccacaaaaggaaataaattctggcttgagacattagggaggaacagggcaaggggaggttcaagaaagttttaatggatgagatgatatttaagcaaggccctggaaaatgagaatttcaaccaatagccatatggtaggtcagaaagcaaagataaggagggggcaagtgcaaggggcaacatcagatatgaccagggtgtcgtggggcatggctgatggagaagaagattagactggagtttgggaatgccacagtatcgaggttggatttaatcctatgggtaataaagccaactgttcaacccccaacccacttgcaatatggctccaaaatagcaggtgtttgataaaatgactacttttactctactattccctccctcttaagaagaaaaagaaagtggaggctcagagaaaggcagtggcttgtcccaatcacactatgatttggccacaaaacaagaacgaaatgttacacccaaaaatgctgcctccacctcccttccttgctttcctccctgctggactacagactatctcaagagtgacgtacaccatcagggcttcagcttttccccgaaacaatgccaaaatattagccatacgtcactgtagtaagagccctgaattgggaatcccagctttgacgcagacatgctgattgactctgtgaccattctcttcacttctccactctattcttccccacctgtaaagtgaggtcctttccagttataaaaacagatgatgctattgtcctgttttgtatctaatcttgctgtgttataaaaaaaaaataaggctctgtacattcatcttggccaattcccttcttatctctacttcccacagcccctttttctacagaaaaccagcattgttcttctggatccatctcttaagaaagcgctttgcctccccggttatttaggtgataagaagtgtcctagatgacagccctggaatgggctggaggcaacaaaaaagcaagtgaaatagacagttacagcgacgacaataataacaaccaacacctctcactaaagagaaagaaataaaaaagaaaattaaaatctgccgcaatgcccacacagtcattgaataactgcatgtgtacagcacttggttacttttacatacttcatattttagccttcatagcagctcacaggggtggatttaatttttagtccaactcctgtcacggtgcctggcacaagtataataaatgttctgtgaataaatgaccctctttttagatgaggaaatcgaggctcaaggagaacaagcaatgtaatgtccccctcctgttcagccatctgcctttcacgccactgaatgcagtagtcctcagtgccctgaacttgaccctcttctgcttttcggactggtccttctaatcccgttgtgactcactacaccacctctcctgcatatgacatctacattttaaaacaaaccgtatggaaataacacattagtcggcttgttcccccacccccgcaaaaaaaaaggcctctttataacagaaacttctcaggctggtaggggaattttattcccccatttatggtagaaaggccctaaccttggacctcacgccatagctattcacatgggggaatgatgaataacatggggagcagcatgtaaatatcattgagccgtagtccagacctataacacatcgggggagctgcatgtgcctgtcgagatctgggggaggaacaggaagatcaagagttctgtgtaggacatgttaagttgaaggtgcttacaggatagccagatgaagcatcaggtgtgcagtcaaagatatgagtctggagcagcacatcctaagtcacctcctgcaccaacacagaacttccaggccactcacttgagctctcccaaatagtttccaagtgtcattatgttaataacctatgagcttgaacaccagattcaaaccccactgcatggcttttaaagaccatctcaagggcttgacactccagggagccaactaaagatgcctggtcctaccatcaacctccaccccattttttatagaaaatgtttctacctgtcctaaggcagggtcctgccccactcccaggcccctttagatccccaatattcctcctccctgaaccaaaaccctcatcatcttccagcatgggtggggcctccattcttgcttctgctcccctgagcagaagcaagtttctcccaacttgacctgattctcctcctaagtaccagtcactgctttgtttctggaatgagagaaaaagacagagtgagagagacaatccagaactcttgctcactcacagctaggctgggcatctgggaggatggctgtgtccatgggaacctgggaaaagccacacccttggcaccctggtcacccacctgtctccctggcagattccgcactgctctcttgcaccctctaccagggctaaccggcctgctcactctccccagcatgtcttcccacgcccactctctaattattacattcccttcacataaactgcccttctctcccaatcaccacatgttcacttcccacccagctgtcaaagtctggctcaacctcattcttgaaaaggaaaaaacaaacaaacaaacaaacaaacaagcaaaaaacctatgatggattaagaacacacttcattccaggaacatgcttatctcctctaactctcacaacaactacagcaggtaggtgttatcacacccatctctcaggtgagaaaacaggctcaacgagtgcaggaggacacagcaagtcagtgacaaagcttaaattcaagcccaagcctgttggcaaccaacgtctgtacccttgatagctacctcatttaccaccaaatccagtggcctcaggcctggctgcacactgggatcacctggtgcccagaccacatcttagaccagtcatacagaatctcttgggctgggatcctccacggtacattttaagggtccccaggtgagttccaccatggacccagaattgaggacccaataccgtataccatctccttcttcatctcttctaaggcatctcttactcgctgtgcactcccataccactttgttcaatcatccaatcattcattcattgagtcagttagtcaggagctactcactagtcccctgccaggtcctagtcatgacatagggctctggggaccaacaagaagcaggacccatgcctcctgctctcatggagcttgctctgcagcagaggaagcagtcagtgagatgtagcaaatgtgaaatgtgcacagatgggaaaagcaaaactttaaaacttttaggacaaaatacacaagaaatctttgcaactttgggacaggaaggaacaacattccttacacatgacaccaaaggaatcaaccataaataaaaaggtgatcaatttgacctcatttaagtgttaagcttttttcattgagagacaccattaaaaattaaaaatacatgccacaaactgggatacaatatttacaacacttatgtctcacaaaggattagttttcagaatatataaagaactcccggccgggtatggccgcgcacgctggaatctcagcactttgggaggccagcggatcacatgaggtcaggagttcaagaccagcctggccaacatggcaaaactccgtctctactaaaaatacaaaaattagccaggcatggtggcgggcgcctgtaatcccagctactcaggaaactgaggcaggagaatcacttgagcccagaaaacagaagttgcagtgagctgagctcacatcactgtaagcctcggtgacagagtaagactgtcaaaaaaacgaaaacaaaaacaaaaactcctacaaataaataagaaaaaaatagcccagcaggaaaaagtatatacatttcataaaagaataaatacattctgtcagttttctaacatatattttttaagagtaaatacaaatggttaggaaacattttttaaaatgcccaacctcattaaaaattatagaagtgaaaattaagccacaataagatacgattttataccaaatacagtgtcaacactttgcaagtctgacctcaccaagtgttaccagacgtgtgcactgacgtggctgctgagatactgatggtgggtgtgtaaatctgtactacaaacaattgcaataaaatgtaataaatatacaataggtggagcaggaagtgacctgcaaccatatagcagatagggcaggaaaaagcctatgaaagctgacatcaaagggataagttccagttacccagctgaagggaaggagggtgtttcagatagaggaaggataagcatgacctattcaaggccagtgaaagaagcgtgcaacggccaagtcaggagaacctgaaattgtgtcaaagagcttggatgcaaagagccgtgggagactattgggggttttaagcagggatataatattcattcaagcatgcagtaaaaggtcactggcacctgccatgggccaggactcgggctctacatgattgcgtctgttttggaaatatcaccctggctgtgagatgaagaacaggtaggagggtcacaaaacttgaagcagagagactgttgaggaagtaagctgtttttgtgtggactgtggcaatcacagaggcagaggatataaatgcacagagacacaaggcatgtgggaggcagaaggaatcaaatacaatgagtgatcagatgtggggttagagtggtgagtgagaagacatactcaaggtgacacgcccaggtatctgggtggatggtaagacattcatggactaggatcgaggaangaggtggggaatgggaccatacctgcagtttataaggggtggacgagggaagattatgcgggagactgagagaggaatagacaaaggaatcccggtgcagtattacagaaactggggtgggagggggttgtanttcaaaaaggaaagaaaattgtcaaatagtatgaaatgctgcagagaaactcacggattttttttttaagcttagaattattcattgactatgtgaataagaataacttttatgaaagaagttttgcttaagtagtaggaagaagcaaaattgttgagggctgatgagtgggaggagaagtaattgaaggcactctttcaagagaaacaaagcagaaggtgaggagaatactaatgaaggagttacggccttcactattttgttttgctttagataagcaagacttgagtgggtctggtgaggagaaacaagtagagtacaaagttaaaggagagacagacagagatagagatagggacagagagagagacagagacagagcacaaaagagcaaggtccctgagaacacgggccttctgtttaaaccccagccagatgtattgcaattcaattccagtactaaccacccagagtttgtgtagactctacaagttaaagagcatggtccccaacaagactgcttctacgtcagatgccaggcacacttcaggggtccccaagccactcatgttttttgaatgactgccataagttcaaaaattcccacaattctctcagattcaataactgggtataaccactcatagaactcaagaaaatgctatcattattattacaattttattataaaggatacaaatcagaaggactagccaaatgaggagacacatagagagaggactagtaaaaaacagagcttctgcgtcctaccttcaaggaatcaggatgcaccaccctcccagcacatcaagtgctcatcaaccaggaagttcctctgagctccaatgtccagagattttagggaggattcattacataggtatcattgattaaatcattggccatgtacttgaactcaatctccagtgtccctcttctccctagaggtctgaagggttggctaatatcatgtggctcaaagccccaactctaattacctttttggtcttttcagggactagaccccatcctgaagctatctacaggccctgccatgagttagctcattaacataacaaagacacttatattactcagaaaattccaacagttttagaagctccatgtcaggaacctgggacatagatcaaattctttttttttttttttttttggagacagggtcttgctgtgttgcccaggctagagtgcaacgacagatcacagctcaatgcagcttcaacttcccaggcttaagtgacctttccaccttaaccttccaagtatctgggaccacagaaaatggctaattatcctggctgatttttaaactttttttttttgtagggatgggatcgccctgtgttgccaaggttggtctcaaactcctgggttcaagcaatcattctgccctggcctctgtgatggttaatactgagtgtcaacttgattggattgaaggatacaaagtattatttttgggtgtgtctgtgagggtgttgccaaaggagattacatttgagtcagtggactgggaaagtccaccctttcccagtggactgggagacccaccctcaatccaggtaaacacaatctaatcagctgccagtgtggtcagaataaaaggaggcagaagaacagggaaacactagactggcttagtcttccagcctacatctttctctcatgctgaatgcttcctaccctcgaacatcagcctccaagttcttcagtttttggactcttggaccttcaaccacagattgaagactgcagtgttggcttccctgtttttgaggttttgggactcagactggcttccttgctcctcagcttgcagatggccaattgtgggactttaacttgtgatcatgtgagtcaatattccttaataaactcagatatatatatatgtatcagacatatatatatatcctattgtatattatatacagatatataatatcctattatatacagatatataatatcctattatatacaggtatatatatatatatgtatcatatatatatatcctattggttctatccctcttgagaatcctgactaatacagcctcccaaaatgctgagattacaggagtgagccacagccaccatgcccagccccaaattcttaattatacaacaatgggtccagagatcagggcctgggtaggatgcagcaataagaaaacagatggtggatggggacacatgttggaagtgtggcaggacatggctgagggaactcataggatggtgtctattttcatggctgagtgtgaggaacagcataaggtcaaaatttcaggtcaatggtgagttttttaaattgttgctgtgaaccccaaaaatctgacccaggtctcagttaatttagaaagtctatttttccaaggttgagaacacccacccactcacgacaagagcatcaggaggtcctgaccacatgtgcccaaggtggtaagagcacagcttggttttatatattttagggagacgtaagtcatcaatcaatatatgtaagatgtacactggttctgcctagaaaggcaggacaacttgaagcagggagggggcttccatgtcacaggtaggtgagagacaaacagttgcattctttgagtttctgattatcctttccaaaggaggcaatcagatgtgcaattatctcagtgagcagagggatgactttgaatagaaagacaggcaggtttgccctaagaagttcccagcttgactttttcctttagctttgtgatttggaggcgccaagatttattttcctttcacatttccccccctttctttttaagaatcttttaaagaaagcttttaaaaagaaaatgagtctctggtcccaggtttcatctgaattctcgaggggaggatggtttatcctaaacgggtggttctgaattttgagaaagtgcattgtacaaaagccatacgaatgaggaagaattaagggccagaacaaaacaagaagatgagggaaagtttggaacttcttagagactggctaaatggttgtgaccaaaatgctgatagtgatacggacaatgaagtccagggtgacaaagtctcagatggaaatggggaatttgttgggaactgggcaaaggtcacccttgctatgactcagcaaagaaattgggtgcattgtgttcatgtcctggggatctgtggaagtttgaatgtaagagtgatgacttacggtagggtatctagtggaagaaacctctaagcaacaaagtgtgttgcttagaaatttctttctttcttttttttttttttttgagctggagttttgctgtgtcgcccaggctggagcgcagtggcgcaatcttggctcacttcaagctctgtctcctgggttcatgccattctcctgcctcagcctcccaagtagctgggactacaggcgcctgccaccatacctggctaattttttagtattttagtagagacgaggtttcaccatgttagccaagatggtctcaatcttctgacctcgtgatccacccgccttggcctcccaaaatgctggggttacaagcatgagccaccccgcctggcctgcttagaaatttctaagccaggatatggcctgtctgcttctaacagcctgtgctcaggggtaaagaaatgacttaaagttggaacctatgtttaaaatggaagtagagtctaaaaatttggaaaatttgcagcctggccttgtggcagagaaagaatccaagtaggctgcagagcaatcattgctagagagattagcatgactaaaagggagccaagtgctaatattcaagacaatgttaaaaaggccttgagggcatttcagagatctatgaagcagcccctcccatcacaggtgcagaggtttggtgcactaggcccagaggttttatgggccanngccagggccacactgctatgcacagctttgggacactgctgcccgcatccaggccactctgctctggctccacccttggctcaaacgggccaagatagagcttggaccactgctcccgagggcacaagccataagccttggtggtttccatgtggtgttaagcctgcaggtgcccagaatgcaagattgagggagcttgggcacttccacctaaatttcagaggatgtgtcagaaaccctaggttcccaggcagaagcatgatacaggggcagagcccttgcagagaacctctactagggcaatgccaaaggaaaatgtggggttggagtcctcacacatggtccccactggggcactacctggtgatactgtgggaatggggctgctgccctccagaccccagaatggtagatgcactggcagctggcaccctgagcctggaaaagctgcaggcactcaactccaacccatgagatcagccacatgggctactcccagggaagcccacagaggcagggctgtctaaggccttgggagcctaccccttgaaccagcttgcaggacatggaatcaaagattatgttgcagctttaaggcttaatgttttccctgtcaatttcaggcttgtgtgggacctgttgctttttttttttttttttttttttttggtcacaggtgtttgaaccagaacaattccatcttgaataggggctgggtaaaataaggctgagacctactgagctgcattcctaggaggttaggaattctaagtcacaggaggagataggaggtcggcacaagatacaggtagcgaagacctcgctgataaaataagttgcagtaaagaagccagccaaaactcacaaagccaaaatggtgatatggtttggctctatgtccccacccaaatctcatctcaaattataattcccataatccccacatgttgaggggaggacctggttggaggtgattggattatggaggcaatttcccccatgctgttctggtgatactgagtgagttctcataagatctaatggttttataagtgtttggaagttcctcctacacacatgctcacactctctcctgcagctttatgaagaaggtacttgctttcctttctgccatgattgtaagtttcctgaggcttcccagctatgcagaactgtgagtcaattaaacccgttttctttatacattaccagtcttgggcagttctttacagcagtgtgagaactgctggcgatgagagtgacctctggttgtcctcactgctcattatatgctaattataatgtattagcatgccaaaagacactcccaccatgaccccaacagtcatgcctgtgccggtctcagcaccatgacagtttacagatggcatagcaacgtctaaaaggtaccccatatggactaacaaggggaggaaccctcagctctgggaagtgcctacctcgttcccagaaagcttgtgaataatccactgcttgtttaacatataattaagaaataactattaagcatccttagttcagcagcccaagctgctgttctgcctatggagtagccattctttattccgttactttcttaataaaattgcttttactttactgtatgtactcgcctggaattctttcttgtacgaggtccagagccctctcttgggtctggatcgggacccctttctggtaacattttgaccaatttctcccttctggaatgggaatgtttacacaatgactgtatcacttttgaatcttggaagtaaataatttgtttttgactttacagcctcataggtggaaggaacttgacttgaatttcagatgagactttggactttgggacttttgggttggggctggaatgagttaaaagttggggggattattgggaaggcacgattttattttgcaatatgagaagcacatgagatttgggggaccaagggtggaataatatggtttggatgtttgccccctccaaatctcacattgaaatgtaatccccagtgttgaagtgaggcctgctggaaaatgtttggattacaaggctgtcgagcacattggataagacgtgtaggnccccgcagctcgctggttaattctgtggctcctgtgaccactattatagcaccaggtctatgaccaggagaattagactggcattaaatcagaataagagattttgcacctgcaatagaccttatgacacctaaccaaccccattatttacaattaaacaggaacagagggaatactttatccaactcacacaagctgctttcctcccagatccatgcttttttgcgtttattattttttagagatgggggcttcactatgttgcccacactggactaaaactctgggcctcaagtgattgtcctgcctcagcctcctgaatagctgggactacaggggcatgccatcacacctagttcatttcctctatttaaaatatacatggcttaaactccaactgggaacccaaaacattcatttgctaagagtctggtgttctaccacctgaactaggctggccacaggaattataaaagctgagaaattctttaataatagtaaccaggcaacaccattgaaggctcatatgtaaaaatccatgccttcctttctcccaatctccattcccaaacttagccactggcttctggctgaggccttacgcatacctcccggggcttgcacacaccttcttctacagaagacacaccttgggcatatcctacagaagaccaggcttctctctggtccttggtagagggctactttactgtaacagggccagggtggagaattctctcctgaagctccatcccctctataggaaatgtgttgacaatattcagaagagtaggaggatcaagacttctttgtgctcaaataccactgttctcttctctaccctgccctaaccaggagcttgtcaccccaaactctgaggtgatttatgccttaatcaagcaaacttccctcttcagaaaagatggctcattttccctcaaaagttgccaggagctgccaagtattctgccaattcaccctggagcacaatcaacaaattcagccagaacacaactacagctactattagaactattattattaataaattcctctccaaatctagccccttgacttcggatttcacgatttctcccttcctcctagaaacttgataagtttcccgcgcttccctttttctaagactacatgtttgtcatcttataaagcaaaggggtgaataaatgaaccaaatcaataacttctggaatatctgcaaacaacaataatatcagctatgccatctttcactattttagccagtatcgagttgaatgaacatagaaaaatacaaaactgaattcttccctgtaaattccccgttttgacgacgcacttgtagccacgtagccacgcctacttaagacaattacaaaaggcgaagaagactgactcaggcttaagctgccagccagagagggagtcatttcattggcgtttgagtcagcaaaggtattgtcctcacatctctggctattaaagtattttctgttgttgtttttctctttggctgttttctctcacattgccttctctaaagctacagcctctcctttcttttcttgtccctccctggtttggtatgtgacctagaattacagtcagatttcagaaaatgattctctcattttgctgataaggactgattcgttttactgagggacggcagaactagtttcctatgagggcatgggtgaatacaactgaggcttctcatgggagggaatctctactatccaaaattattaggagaaaattgaaaatttccaactctgtctctctcttacctctgtgtaaggcaaataccttattcttgtggtgtttttgtaacctcttcaaactttcattgattgaatgcctgttctggcaatacattaggttgggcacataaggaataccaacataaataaaacattctaaaagaagtttacgatctaataaaggagacaggtacatagcaaactaattcaaaggagctagaagatggagaaaatgctgaatgtggactaagtcattcaacaaagttttcaggaagcacaaagaggaggggctcccctcacagatatctggattagaggctggctgagctgatggtggctggtgttctctgttgcaaaagtcaagatggccaaagttccagacatgtttgaagacctgaagaactgttacaggtaaggaataagatttatctcttgtgatttaatgagggtttcaaggctcaccaaaatccagctaggcataacagtggccagcatgggggcaggccggcagaggttgtaaagatgtgtactagtcctgaagtcagagcaggttcagagaagacccagaaaaactaagcattcagcatgttaaactgagattacattggcagggagaccgccattttagaaaaattatttttgaggtctgctgagccctacatgaatatcagcatcaacttagacacagcctctgttgagatcacatgccctgatataagaatgggttttactggtccattctcaggaaaacttgatctcattcaggaacaggaaatggctccacagcaagctgggcatgtgaactcacatatgcaggcaaatctcactcagatgtagaagaaaggtaaatgaacacaaagataaaattacggaacatattaaactaacatgatgtttccattatctgtagtaaatactaacacaaactaggctgtcaaaattttgcctggatattttactaagtataaattatgaaatctgttttagtgaatacatgaaagtaatgtgtaacatataatctatttggttaaaataaaaaggaagtgcttcaaaacctttcttttctctaaaggagcttaacattcttccctgaacttcaattaaagctcttcaatttgttagccaagtccaatttttacagataaagcacaggtaaagctcaaagcctgtcttgatgactactaattccagattagtaagatatgaattactctacctatgtgtatgtgtagaagtccttaaatttcaaagatgacagtaatggccatgtgtatgtgtgtgacccacaactatcatggtcattaaagtacattggccagagaccacactgaaataacaacaattacattctcatcatcttattttgacagtgaaaatgaagaagacagttcctccattgatcatctgtctctgaatcaggtaagcaaatgactgtaattctcatgggactgctattcttacacagtggtttcttcatccaaagagaacagcaatgacttgaatcttaaatacttttgttttaccctcactagaggtccagagacctgtctttcattataagtgagaccagctgcctctctaaactaatagttgatgtgcattggcttctcccagaacagagcagaactatcccaaatccctgagaactggagtctcctggggcaggcttcatcaggatgttagttatgccatcctgagaaaggccccgcaggccgcttcaccaggtgtctgtctcctaatgtgatgtgttgtggttgtcttctctgacaccagcatcagaggttagagaaagtctccaaacatgaagctgagagagaggaagcaagccagttgaaagtgagaagtctacagccactcatcaatctgtgttattgtgtttggagaccacaaatagacactataagtactgcctagtatgtcttcagtactggctttaaaagctgtccccaaaggagtatttctaaaatattttgagcattgttaagcagatttttaacctcctgagagggaactaattggaaagctaccactcactacaatcattgttaacctatttagttacaacatctcatttttgagcatgcaaataaatgaaaaatcttcctaaaaaaatcatctttttatcctggaaggaggaaggaaggtgagacaaaagggagagagggagggaagcctaatgaaacaccagttacctaagaccagaatggagatcttcctcactacctctgttgaatacagcacctactgaaagaactttcattccctgaccatgaacagcctctcagcttctgttttccttcctcacagaaatccttctatcatgtaagntatggcccactccatgaaggctgcatggatcaatctgtgtctctgagtatctctgaaacctctaaaacatccaagcttaccttcaaggagagcatggtggtagtagcaaccaacgggaaggttctgaagaagagacggttgagtttaagccaatccatcactgatgatgacctggaggccatcgccaatgactcagaggaaggtaaggggtcaagcacaataatatctttcttttacagttttaagcaagtagggacagtagaatttaggggaaaattaaacgtggagtcagaataacaagaagacaaccaagcattagtctggtaactatacagaggaaaattaatttttatccttctccaggagggagaaatgagcagtggcctgaatcgagaatacttgctcacagccattatttcttagccatattgtaaaggtcgtgtgacttttagcctttcaggagaaagcagtaataagaccacttacgagctatgttcctctcatactaactatgcctccttggtcatgttacataatcttttcgtgattcagtttcctctactgtaaaatggagataatcagaatcccccactcattggattgttgtaaagattaagagtctcaggctttacagactgagctagctgggccctcctgactgttataaagattaaatgagtcaacatcccctaacttctggactagaataatgtctggtacaaagtaagcacccaataaatgttagctattactatcattattattattattttattttttttttttgagatggagtctcactctgttgcccaggctggagtgcagtggcgcaatcttggctcactgcaagctctgcctcctgggttcacgccattttcctgcctcagcctcccgagtagctgggacaacaggcatgtgccaccatgcccagctaatttttttgtatttttagtagagatggggtttcactgtgttagccaggatggtctctatttcctgatctcatgatccgcctgccttggcctcccaaagtgctgggattacaggcgtgagccaccgcgcccggcctattattattattattactactactactacctatatgaatactaccagcaatactaatttattaatgactggattatgtctaaacctcacaagaatcctaccttctcattttacataaaaggaaactaagctcattgagataggtaaactgcccaatggcatacatctgtaagtgggagagcctcaaatctaattcagttctacctgagtaaaaaaatcatggtttctcctccatccctttactgtacaagcctccacatgaactataaacccaatattcctgtttttaagataatacctaagcaataacgcatgttcacctagaaggttttaaaatgtaacacaatataagaaaataaaaatcactcatatcgtcagtgagagtttactactgccagcactatggtatgtttccttaaaatctttgctatacacatacctacatgtgaacaaatatgtctaacatcaagaccacactatttacaactttatatccagcttttctgacttagcaatgtattgatgacattatgcatgcttagacctccgtattctattctcggttataacacaatcacagtgatttgtcatatctttccaggatttgttaatttcacttcttcagctgtttcccccttgttggctggaactgattttctatcttctgggagaatcttcagcaagccaactcaggatttgttgggtgcattttgtcaagtctaggacccaggctctgggtgactgatttcctctaattaccgagcaatgtaaaatgaggaagtctgattgtgtaaaggtgttaaacttttgtgtgacggcaaaactttaataccatgaatagagattccagaattttccaacttctaacgggattcctttcactccctgacattagaatgttagaaaatctaccacaaaacatctgtgaggctatcctacaaggcccgtttttcaaaataggtttttacaaggattgctatttgggatgatagtttcagaaaggcgctatcaaagttaattgatgatgtgtgcaagctgaaagttatatgttagaactagcagtgatttcaaaaatatcccttttaggctttttgctaatatatctgctcattttcaaagttcccaatattataaaactttttaaagcagaaagaagaaccctccatttctgctggccccttccctgttcaactaaaaagtattttcccaggcaatgctatcccaggactcacactccatccatccatcacctaccataagttctttgaagggctcattctgagcgcttcctgagtgcctgggatctgttatttctctccatttctgctgctgcatggtagtccaagtcctcctcccttttcccctaggccatttgaatcatctgctaattggttttcctgattgccacggaaacttcctccatcccttcctcacatatcagccacagaagtatctccaaaaagcaaatctggtgacatgaagcccttgcacaaaacccattcattactggttccacacctcctttgtggataagttcaagctcctgagtgtggcaagcagggcccacctggaatcccctgccctcctctcctatcccacgcatcaatctttcctgtctatttgcagttccttgaatgtgatattctttctagtctctgtgcttttgcataacctgttcttcctgactggaaactccttctcctccttgtagtttggctaatttctagtctttcaagactcagctcatgcttcaccccctctataacaagtcctttcccaagctgggtggtggatgctcctctgtgctgtgtgagtcttgaacatcctcagcaaacctcagctttgtttgcttgtctcccttgctgtcaatgcacctgattcagggctggcatatactgttcacctccatgactggctcatggtggtgctccgtgaatatcatccacccaaacggatgagagctaccatgccatcacttgtgacttccatctggagctaacctcccccgacaggaaagcgtttccttaggaaagaatatctttgggttaaatagaagtagagactcaccagaagcactatgtccagctcagaatgaactgctcagtaagcagccttgtcaatgaggaggcagcaggccagccccagaggcctcaaagtgggagagtagagaagcgcagttcctgccacaaaggcacagtggacaccttgctcccctggctggctggaagcagatggtgtccacctgcttccatgggaattctgcacctttaataaagttttatgggacaggaaggtgactggcattgacattgtaacgaggaatgggtggtgccacctttgctgtgtcttaccagaaatacctgtggcaggtaaatttctagagagaccctcccatttctcccatatagcaattttgaaatgtttcctgagggctttccaaattcatctgggaacataggagttccagaaagatgaaatcaaaggtgatggtatgccaaagaaagtagcttttagaatgacttacattagccattcatccattcagcacaccaggcattcagtttgaggggtgtgtgtgtgtgtgtgcgcgcgcgcgtgcgtgcatgagtgcatgcgcgcgcgtgtacataggggaagggaaacaaaacaaaagtacacaagacatgatagttgtcctcaaggagtttttgcaaatgttcacaatttaagagaatatgctgtgctgtggctggtgtataaaccaactgctagggagaggccttccacacacacttggggcaaatgcgacctctaggactgccagtggaatctgggcatgctgtttgtggtcgataaaccctggtcccttgatcagggacctatgtttacttttcctctccctggaagtcttcattagtgggcatccagaaggtcttgcacagggcagagggaggcacaaagacaagagtttgaaaccagcctggacaacaaaatgagtttctatctttacaaaaaaaatttttaaaaaattagccaggtaggattgcatgtgcctgtagtcccagctattcaggaagctgaggcaggaggattccctgagaccaggaattttgaggctgcagtgagctattaagttggcgcaaaagtaatcgtggtttttatcattaaaagtaatggcaaaacttttaatgacaaaaaccgtgattacttttgcaccaatttaatatgattgcacgactgcactgtgctccagcctgggcaacagagtgggaccctgtcacaaaataataaataaataaaatgtaaacatgtaaaaaaaaccccaaaaacaaaaaaaatgggtgttgagacccctgaattgaggaataataggaaggagtgtgattctgtgtgtgcatgcatgggtgtgcaccctcagtgcctgggtggcttaccctgggctagttcaggtggcaaatggttttcctccagctgggctaccaccatcttcccccagggcctgtccatgtatttggtggcaagatacctatggactagagtccctcctcagaggaaaggctcctcccatttctctggctttcaggtagtagtccatgacttcaacaggtccccactgcaatgttatgggttagtttaggtggggtctcctctgagagcctcccatagcccaaaaggccctgtcctagctggcactgcatctccctcttcccagctctcagcctttctctttgctcatcccactccgcacaggctttctgcctgatccttggatgtgtcaatcctgcccctaagggatgcaaggcaatttgtccttttattattaagatctctcctgaggccacgtgtggtggctcacacctgtagtcctagaactttggtaggccaaggtaggagaattgcttgagctcaggagttccaggctgtagtgaaccatgattgcaccattgcattccagcctgtgtgacacagcgagaccctgtcttttttctttttttttttgagacagggtctcgctctgtcatccaggctagagtgcagcggtgtttttctgctcactgcagcctcaacctgcacattttttgtagagacggtgtcttgctatgttgcccagagtggcctcaaactcctgggctcaagagatctttccacctcagccttccaaagtgctgggactacaggcgtgagctaccgcgcccaacaaagaccctgtcttaaaaagaaaacaaaaataaacaactccctcaagtcttttttttttttttgagacggagtctcgctctgtcgcccaggctggagggcagtggcgcaatcttggctcactgcaagctctgcctcccgggttcacgccattctcttgcctcagcctcccgagtagctgggactacaggtgcccgccaccacgcctggctaatattttgtatttttagtagagatggggtttcactgcgttagccaggatggtcttgatctcctcaccttgtgatccgcccgcctcggcctcccaaagtgctgggattacaggcatgagccaccgcgcccagccagacctcttgagtcttaaactcctctgtagttccagccaccctttagcacatgactctgttaattttgttctcactgtctgaaatcatctcctgtccactcttgactgacaggtctctgcactagcccactgcttaatcagagtaggtccctgtcaacttattcatattgtgtccccatgccagtgtggatgattaaaattgttgagtggaggctgatcagatgagccatctccttccaagtcctcacttgctggctcctgtcttagttttagtccccattcttcaaagaacgtgagccctggaaagtattttagtcatttagttcagtgcctttggatgggaggatcacatccctgggtcccgtcctgcagactgttttgctctagctgactaggcaggattccctgccttctctcacttcggcatgggacttccttctgaaattgctgctcagtcaagagaatgaccttccccaacataatcctactccacagggacttaaaggtgtgtcagagatctcttgctcatctttctggccaggtgccaacgtcagtttatagccaagggacaagactagttagcagatcaggcaggtcttagaccccagcgtaagtgccagacttctagctgcagttgttcctgcccacactgggcgttcaggtggagagagggcatggcactacactgagctctcggcgaaacccaggactctgaaatctcggtgtcagccacaggccactcttttcagcaggacttcagtcagtcctgtcactaggctgtcgagcacatggtaggctttaccccaaggagtgtgcttgctgatagcatgtgtgangggacgaggagtaaataatttctgccttcaagaaattgcaaactagtaatggagataaaatcaacagaggaacaattagagtataaggtaaaatctaagggccataagagaggagaagaagtatgggagttcagaggtagggggtaaatgaggggagtaggtgggtagaaaaggttaaaagtaaataatgatgggaaggaagacaaaaagacgacaggggtgccaaaggactcttaacctcatctgaacggagttgccctgttttgctctctgatgctcatgtatctatccttagagacagcttggcgggcaatgtagagcgtaggggctgacatagggggttggagtcccacctccgtgacttctagcaaattagcaaactttgctgctgctaagcctataaggcggacagaaatgccatctttaaagcttgttatgtaaagtgcctaggacctcgtaggcatcaacaggaataatggatgaaacaaaacaacggtgcgtatcttggagaaagtggcatctgagcaggagtattttgaaaggtaggaaagggctccaagcacatctaagagattagggaacgcagaagccttagccctgggtgcagatttaaccaatcaacttctaaccaccgcaggctgagaggtgtggagtgagagccccgccagaggcaggagacccgggcttcggccagaccccgcctcctggtacagaggaccacgcccggctctgcctggagccaaatgtggatcaaaacagcgcgcagcttcccactgctggtgaaaacccgagcaaggggcctcagtttctttatccggaacgtggtgacaatgacatctctttgcaaggctgctgcagggctttctggaaatacgcccgtgaggtatctgggcctgcgcacagcctcccccgcccaggacccagacgtctacctgggggtcccgtctgcgctcccgggatggaaaacgcccaggggaaacttaggcaggcgagcggacgggcacctcccgcgggacgaactcactcggtggcctcctacttccccggccgtgttccaacgcctgagaataacgggaacagcggtcgtactcaccgacagcggcagcagcggtaggcccgggccccaccatgactcttcagtgacagtttttcttcaaacgccgcgcctgtagccaggaccggcgtgccgcgcgtccacgcgtcctcattggctcctgcgggtttgaaactcgctagtcgtcagcacgggagggcgggacaacaggcaataggctctttgcggttggctctggccttgagaacccgaccttggggccctttgattggaagaacgtgcagcgcacctcggcattgagggcggcttcctcggggcgcggcgccgcccgcctctgagtgcgcctgtgagtgcgcctccgagtgggcgtgggaccctccgtgggggcctcagccgggctggtggttggggggcggttacgctgaatccagctggggttggcgcgccgggagtccctgggcggagagacagggcggtcctcccaggatgctggggccgctacctgattctgtcctttcaaagtctcagactcacaggagctgtgaaaaaataatattataaagaggacatatgggtcttatgcatctaaaggctcctagttcttagtactgcagggtggctcgtttaattgtggtaaaatatgcataacatcacatataccattttaaccattttaaagtgttaaatttttcaaaaatgtgcagtttagtggtattaagtaccctcacattgtggcacagccaccactactgtcctttccagaactttttcatcttcccaaatgaaaccctgtacccgtcactaactccgcactcctccctcccccagccccaggcaatcaccattctagtttctgtctctatggatttgacaactgtaggtgccatataagtagaatcatgcagtatttgttctgtgactggcttgtttcacttagcataaagtattcaaggttcatccatgtgtagcatgtgtcagaatttcctttccttttaagggggaatagcatttcgttgtgtggagatgccacattttgcttcttggtccatccctctccggacacttgagttgcttccactttttggctattgtgaataataatatgaacatgaatgcacaaataactctttgagactctccttttcattcttttgggtatataccacgaagtggtattgttggatcaaacggcaattctatttttaattttttgagaaactgccttactcctctcacggtgatctcttgttcaaggtatattttcgatttcacctgatcagctgactataaggccataaggctaacggagaaacgcaggcctagtttctcctagttactaggagatcgcaggcctcgttgtcctgaatccctagacacacttcattccccttgttttaatcctaaattttttttcttttgaagtttgtcctgtttcatctattctccagtttcttaaagaggtctggaaaatgcttttggctccttgtgtatgaaggttcctcttccatggatgctggagaagtcgtgtgtggaggggcagtcatatctgggcacctgttggccaggttcagcttaccagttgggtactcagcagggcatgaagccactgcagcagcccttctctttagccgtaaatagggagtttggaagagagccagggtttctggatttatgcattttgatattttcaatagtgtattaaatgtttaaaataggaaaactgatcattatttttgttaatgactgagaaagggactccttcaccaacagtttcagaaaagtgaaggcggttttgttttggtctttgtagaatctaggtggttgaatgcatgtcagttgtagaagtcaccttgcctgatatcccacgcagtgctggagtattccacagaccccatgtaggtactgcacctttgcaggtatactgctggtgttggtgagctgccttacctgtcctgttattggagacccctgcttattaggaaacttaaaatgaactcaaatgagcttccttgcttactggtcctagtcctttggagcaacataggccagttctgcctcgtttttttccatcctttgggtatttgacggtctattttgtaggacacaaaatgtgggaaaatagctaggcaggtttaaaaattctcaactctaccaagcatggtggcttatgtctgtaatcaatcccagcactttgtgaagctgaggcaagaggattgcttgagcctaggagtttgagaccagactgggcaacatagcaagacctcgtttcttaaaaaaaaaaaaaaaattacaaaaattaaccaggcatggtggcacacacctgtagtcccttctactcaggaggctgaggtgggaggatcacttgagcccaaaagttgaaggatgcagtgcactgtggtcatgccaccgcactccagcatgggaggcagagcaagaccctgtctccaaataaatacataaattaaattcttaactcattcatcaaagtatccactgtagctttccatcatcctggtgttgttttttttagaaggatctggctccattgcccggctagagtgcagtggcatgatctcagctcactgcagcccccacctctctggcttaagcgatcacccacttcagtcacccatctgggtaatttttgtattttttgtagagatggggttttgccatgttgccccaggttggtcttgaactcctggctcaagcgatccatctgcctccatctcctaaagtgttgggattacaggtgtgagccaccacaccaggacaatcctggtggcttttaacggttttccattgctctcaggctaatgacctataagcccctgcgggcttggccttttactccctcagcattagccacctcccttagccttagcccacactactctccccttgctcagtgttatccagacactttgttttttcctttccatactcctctctgtctgggaatccaacctttctttctcatttctctagttgattattattatttttactctagcagccttattgagatatttacataccgtacgattctcccacttacagtgtacaattcaattttctaacattttcatcaccccctaaagaaaccctatactcattagcagtcactccccattctcccctcctctcagcccctagaaaccatgaatctactatccatctctatagatttgccttctggacatttcatatgtatgaaattatgcaatttgtggtctctgatgggcttcttttgttaccaaaatatcatgggtttgatctaggtcctgctgctcgctgcacagaaagccagccactgagatgacaagtattgccaaggaagaaggctttagtcaggtgctgcagctgaggagatgggggctcaatctcaaatccatctcgctgacctaaaaccaggggtttggatagcagggaagaaatgtaacaatgcgtaagaaaacaggaaccagggaggggcaaggaagcaatcctgatgaatgagtggtccaaagtctcattgcctggatgtggtgatctggcgagtttcagttctttgatactttttttgagaggcctgaagtcttttccccaggaaggaactcaaacaaaacaaatacaagcttccagctttaagaccagaagcgtcaatttctatgtttatccgaaagaacagtctatgggactattggttaagtttcactttcacttagtatgctgttttcaaggtttatccacatagcatgtgtcagtacttcattcttttatgactgggtattctattgtgcggatatacaatattttatttgccattcatcagttgatggacatctaggttctttccactttttggctattatgaataatgctgttatgaactttcatgtataagtttttgtgtagacatatgttttcaacactcatgggtatatacctaatgagaggaattactgtgtcatacgataattctatctttaaccatttgaggaactgccagactgttttccaaagcagctgcagcattttacattcctaccagcagtgtatgaaagttccagtttctttacatcctcaacaacacttgttattgtccatcttttaaattacaaccatcctagtggttgtgaaatggtatcacattgtggtttttatttgtatttccttgatgactaatgatgttaagcatctttttatgtgtttactggccatttgtatatctctattcagagtctttgccaatttttaaattgggtcagttgtcttcttcctttttttttgagatggagcctcactctgtttcccagctggaatacagtggtgtgatctcagctcactgcaacttccacctcctgtgttcaagtgattctggtgcctcagcctcccaagtagctgggattacacgcacctgccaccattcccagctaatttttttctttgtattttgagtagagacggggtttcaccatgttggccaggctagtctctttgttgactcttaaccatccttcagtctcagacaaaacatccctttctcaaggattgtgattagcttgattatttgcttatctttctccctgctagtctgtaaactgagggtaggccactatattcattgttcttggcaccaaatagaaactaaattaatgtcttttgaatgaatagggctttctccttttaaagatcccttcaatacagtaaccacactatatataagtagccacaagcccattcaataatactactagtncttgcgccaaaccggctcagcgttactatactggtctcaaactcctgggctcaagcgatctgcccccctcggcttcccaaagtgttgggattataggcgtgagccacggtgcctggcctcaaataactatttaagtgaaacaaaactagtatggcactaatgaaaaatgtataaatccataatcgcagagggatttcaacttacttctttcgattatgtaaaggtcaaacagacaaaagacaatgacaaaacttaatgcaatgaacacttttgatttaatgaacatatattggatatgtacccaagaattagagaatacatactagttttgagtttatgcagaacatttacaaaaatttagtggaagcctaaattataaaaagttgctgtcacgtagaataacacacaaacccctgagtccggaattcaaagccctccacactctcctctacctttgcatctttatcctccaccacactgcagtgcatactctgggctactactcactgttcttgattcaaattccatgttctgtcagctcaaatcattctctctgcctggaataactacttcatacatattctgctattgaattcttgtcttagcaccccatctactccaagacgatgtccagttggggttactccctgtcccattttctttgattacactttttttttctacttccattatattattgatcacatctgtgccacagtttttgactttgtgtctgcttttactcttttctagaccctgatagctcctgaagggttgggtcatttcttttttatttgctcattcctcatggcacagtgagtgcttaataaatggctattgactgaaattaaactgtatctaaatggacatattccacttctgggccattcattctttctttctattggaaccaggagatggggaaccataacaaaggtaaggttgtgccatgtgaaagaacatggaaccttcccctgagggccaaaaaagagcagggaaaggtgcaaagacaaaatcttccatttttaaacaatgtaagaatgtggtccacctcatgctcaggtgggactttatcatgacgttatttttggggacttatagctgcatcatttaccccatatacatttacctttagtgtagggaactgaggacaggaattttgttgatgcagactcttgctaatgaggctaacacttggagaatttttatcatgcattcaagaagcttgttttacatttcttcattaatactttagttggtggtttagctttagttgtaggcttatcagatatttggagatatcttcataaacgatggctttggttttagaagagttattctgaagctactatttctggcaataatcaaacagcatggccatttgttttgtaaggcctttcctagaatatgacggtaaaatctacgtgtggaaaaatgcttattcttctgtcctctataaatgtgaatctagtttgtcttcaaaatgaaatcaagtgattaaaatgtagttttctaagaagataaatggagcaaagcactctgtgtttcacagtgttggaaatcactcatccctcataaaactgtcccaactgatcctgactcacatgaatgaattaaaataagagttaataacatcaatttacatttttaaagacactttcccatgttttagactattggttggaaaagctggtaggtgtacaatttgtggagagttggctgtttttgtctgtcgttgtttgacgtatttcaaagccatatctaattttgttgcagaatggtctgaattctacaaaaatgttgagttgtgtagtgtggagaagtacggagccatttactgaaaggctggggggaaatgacgagaccctgagataaggcagtagtggtgcgaacagagtggaagggaggtagttgagatatgttcagagtagaatcagaatggacatagtgaacaactggatgcaggtgggggctgaggaagcaaagttgaggataattctgagacttctaggttgatccactgaagttacattattcaacaccacaaggaaactaggggaatgagaaggcatactggtttgctttggagtggaagggcagtgatgtaagaggagttaatgagttaaagtttggatatgcctgaacttcaatttgatatgtgcatctgatatacccttggggtgaccctccaggcaatggttgaacatgtgtatttcttagtaactgataggcatcacagactcacatcagtaaggaagcaacagcaaacttgattggacgatatacctggaactcagtaccctatgactggagcaagtctctgtcagtgaaatgaggataagaagaatcttgaccttgtggaatatgttgttaggaatatatgtgatgaacaacataggatacttcctacagggctccacatgtagtaagggctttataaatgcttgataaatattattgttgtaatttatttccaaagtaagatgccactggaggaatctttggaacccaaattaataacaaataggactggatgcaatggctcacacctgtaatcccagcactttggaaggccaaggcaggaggatctcttgagcccagaaattcaagaccagcctgggtgacacagggagaccttgtatctatgaagaattaaaaaaaattaaccagatgtggtggtgcacgcctatagtccctgctgcttgagaggctgaggtgggaggattgcttgagcccatgaggttgaggctgcagtgagccataattgtgccaccacactccagactgggtgacagagtgagaccctatctcaaataaataaataaataaataaataaataagtacaaaccagcaaacactaatcctttctagagattattgaactctggagggcagatctgaatggagccagcagagggacctatggagatcagcctggccctggacagcaccaggcaatggggttgctagagaggtaatggggttgaacagggtttaagccatgaggtctcaagaatccgtgaagactcagactaatttttttttttttgcatgaggattaggtgttcctaggaatttcaatgagagcagggttaatgaaggaatgcagggtaggagagctgagggaaggcatctgagagagcctggcttatgaatggctgcgtcagtatggctcacctgctttccttgtatctacttagcagatgatcccaccccaggcctccagggccaaggtcatttccacatagtcatgggcccttgagggcctggagcagtgtaaggaagacagagtcttaagaaattgcattaacagtcatggtgcttggcaagtgtcgtcatcctatgccaagcctgatctgaaggggtgcatgctcataggtagctgctgcccaagattacagcagcttcttcaatcccagatccatgctctcctatattcatttttccaggggttcctgtccttcgacagtgatgagatgcagaatgacttattgagttattctcctgatagttgccaacttttccaaatgacaatggggcatggagcttgagagtggaaatgaggccctagggatagcgtgcttaggaaaacactcccagcctgatgtaattctgggggtacaatggcattttcatcatcaagactgatgtaaagggtgactagcagtgagttgggggtgactcgcactggggctaggtttctgattctgcctaatccagacagagcagaagcactagtgggctggtagagggcctccagggcctcacttaatgtcctggaaaaacagctccagattgttggttcacgttctgaggacaagcttgggtactacaggatagagagagtggtgggagatgccgtggcctgccctgctgatgcctgccctgccattcctgcgtgtgatgtctctggggcatcttgccttccctgcccagacctgtagttcagctgagggcatgtggaggccaaatggcttcttagagtgttactttccttgaacagctctgctgggagaactggaggagctagctagtcacggtaactgcagcagtcaaaggatcgtcccggtggaggtggggtggaaaggtagagaaagagaacatatagcgttttccttggagatgtgtgggcatgtcatagaggaaatacccaattcctgagccttgagccctccaggaaaccttggaatattaggttagtcatccccaaggaagtctaagaattctggtctcacccatctcctttaattcccacaatgatcctacatgatattaaggaacacgggccagtaaccctccaagcaatggatgtggtggtgaagtttgacctcatgatggagcggaggttggtttgaaacctaagaatttaatttattgtttcaaactgttctccactcagcgttattaaagcatacataattgacacataaaaattgtatatgtctacggtgtacaatgtgatgtttcgatctatgtatacattgtgaaatgattacaacaagctaaataacatacccattcatcgtgtttcaaaggaattaaactcaagcacaaaagagaggtgctgttgaagagtagggctgctctatctaagtagtatgtctggggttgtcctggatcagggtccttttgtgctagtaataaaccagcccttctggggctgctccactttccccacattttcttctggagcctccctaagaattaggacatggccactttctctgcataggcttcctacttcaacaaggacagggcttgtgctgccccatgccacttgagtgtccctacagcacagagctgagtgcacactggctgagtgaggaaatcccccagattaatcttggttctaagcatcatggctgtatttcacacgtatatgaattacaaattacagcatagtcgaataaggatttttgtgctacaactggaatcccagattatgcaaattggatagtataatattgaaattcctaggactttttattagttttaaaaaattatacaagcttagagtaagaaattaaacagtgcaaaagaattcactgtgaaaagtaaaatgctctgtctctgctgagagacagatattgcagcccagatactactggggtcaatagtttcctttaagcatgccattttgatggtttatgggacttacagctcaagaagcttgacactagggttgatctcagaaaatcattgttgcaggtattagatatgaccgtctcataaagatacacacacagacacagcgattggagatattcactggggcttatgggctgcttgtcctttctgctctgtgcctaagttgggctcagagtagcctggcatcggctgtggggagaatgctggcatggggttagcaggagcccacttaacatgtcctaagccacctggaagagtccttcaaggagaccagactccagaggccctaaggaaggaaggacttttgcccgtttttaggtattctagtcccagagtttagggaggaatggtttggctttgggtcgtgtgcccctttaccgagtgggatgggatgtgcccatgagctgttgagctggctcttggagaagacagcaaaagcgggaataagaggtcaggaagctgtgtggttgtaggaaatcccagcagagggcctgggggtcaaaagtggtcatggtagtgacggtggaggctgaggtggtagaaaatcagaggacaaaccccatgggctgctggtgatctgaccgagctcctatgctctcctggttcattttaggctctgtagcagcagatgattggctggtgtgagagcagtgcacctgccatatcaggcaatccaagacaagtccaagctacgctgggaggaaacctgaaggcagcagcaggtagactggctgaagacagacaggcaggcaacttgtcaatcagatttgtgtttttaaggacttttaactggggagccctccgggacagatcagatgagagtgaaatgtgctccgccttagccggccgttcgcaattctgtaaaagggagagtggttttatttatttttaaacatagtcaagctgctaaagtatatgatatgtatagatagagtataattaaatactttcaactacagacaaaatcaggagaatggaattaaaaaacaatttacaaatgggtaatggcagcattgggttgcgcccacccacgagaaggcagacaccaagattctaagatcacacgtggccagcacttcagacttcaaatagaattcgtgattatgcattatttttctcggaaagttttcacttcactatatgctacttgacacttgctttcctaagacatccctctatttttgagatgactaactcagcaattcatttctctcacgcataagctgtcactcaacccaaacccaccaagcctgcattctaccctcaataaggtcttggtgtgtaaactgacccacttcacctagttccttagccctctcttgaccagacatgactctttcataagctagacctataaagtcagggctcttaagtagctgatctctgatagtgccaagtgtcccccactgttcacattttccactccagcttctaacaggtgatagactgctttttgggggtaggggcaccaaaacatatagacctcatgtttggatgtagacactccagtttctttaaattacaactacatattaataatgacttccaagtgtacatttcagtccagatctctccctggatccccaaactttgtaaaacccaccgcctagttgatatcttttgatgtctgacaggcatttcaaatttaatactgtcacaaacaaagttattgattttcatctctgcatctgttacaaatttttcttactttggtaaatagcaccccaggctgtgtcactgccaagaactttccacagctcttggaataaaattcaaaatattttccaaggcagaaaggcacagtgtaatctggctcctgcctacctctccaacctcgtatcacactagtctccctgtcactcaccccctccaggagctcaggtatccttaaagtttcttttctttttttttttttttttttttttgaaacagttttgctctgttgcccaggctggagtgaagtggcatgatctcaggtcactgcaacctccgcctcctgggttcaagtgattcttgtgcctcagcctcccaagtagctgcaattacaggcgcgtgccaccacacccggctaatttttgtatttttagtagagatggggtttcacaatgttggctaaaccggtctcaaactcctgacctcaagtgatctgaccacttcagcctcccaaggtgctgggattacaggcgtgaaccattgtaccctgcctccttgaagtttcttgatccagactcattcctgccttaaggtcttgcatcttcagtcctcccctcaaatgacacctccatgaagacgcaattacctgtaattaccgtgtcttatttagtcaatgtgttggttttctgtctcctccactacagtgtaagctctatgaaggcagaaaccttggcagtccagttcccagcacagtgcctagcacacataggtatttaataacacacagtaaaattcaccttttagtgtgcaattctgagttttgacaaatgcatcaagtcatttaagtctgactattatcaagctataagatggttgcaacactatcactaattccctcatgctccttggtagtcagtctcacccctaacgcccccctcctggcaatcactgatccgttttttgtctttatagttttggtttttccagaatgccaataactaagttttgaatgaatgaatgctattaactctcatttctgactccagagcaacatccatgcaatatttattatttcagccccaaatactgccccctcaccttcactccaaccacctacttgatgatacaaggtgagacatttggcatgtgcttcctccatgttcctagcattttccctatctccttagccttccttctaatcataaacgaagagtgaactttccctttctaaaggcaacttactcctaggacctcgatgccataattttgtttctctagtactttctatatatacaccaaacaattagctccagaaaggtaaagactcactgtgtgctcatcactgtgtctcctagcgcctggcacactgcaggtgctgaagaaacacctacagaatgagtgaatgaatctctccctctctagactccttctcttttgtaatcaaacatgttcaacctgcaacacagtcttatgaccaatcctctgttgtctgacctaggctgagctccagggctgggaccctgacttccttattcaccacctcaaggtctctgcactcacttctctttctgctcaggattgtttttcttcttgtcaccagtcttttctcagacttaggtctcagctcagacattgctgttgaaagtacttctactgatccttttatctaaagcagccattccagccctactctcttgatcatagcaccctgaattaagttgtttacttactgtctcttcaggagggcaaggagcttggtggtggtgttcagggctgtaccaagctgtaccttgcttcaccctgctacactttttagcaaccatctaattttacatgctcccttcactcgtcagaaatttccttattttctacttcaagcaggtatacatatgtgcttctcctgggaggctcacccacttcatgagactacatttggtcctgggtagaaagtgtacaaaatccactggctcagttttaatcaatgtatgttaatattaaccaacctgagatcttgatttccacgcctggctaattttgtatttttagtaaaaacagggtttctccatgttggtcaggctggtctcgaactcccgacctcaggtgatccgctcacctcggcctcccaaagtgctgggactacaggcatgagccagcgtgcccggcctaagatcttgatttctaccatctgaactctgtatttgaactgactgctcctgcttgagcttactggccaaaacttggcccactcagactcacggaagtttctggttcttccctggtaacttttctgaacttaaccactggtttgcttgacaagagattaccatcttctcacttcctagctatgtgaactcacttatctgctctattgctgttcagtctagcacggcacttattgaacgagtgtctacatctgcaccccctacttcttactcatccattctgtttcaatttcttaaaaagaaaaaaaaaaagctattgtaaacatacgattacagaaaatgatttataacatgtgtatgtaccacctagccctgtcaagtcttaatatttgttatatttgcttcaaatcttttttcagactgtagttaaaaattacttaggagccattatttatggcctatttcctgacctagtcttcttgatggtcaatttgcctaatcatcttaagttgcaaaagcttagaattaaagcaaagtaccttcgatcctctgctgttgccttctttttaatatttgggtttgtttgggtcccatttacggttgtgacatcagcttgagttttgggagctgtcttgttcagaaaatggttctggggaacagcctttttcaacttggagtccaaagtctgtgctttttgctgaaagccattattgttatgtttattaccactggttccatttggtcttatgctaggggtgcttggaatggctgaattaaatctgccaactgtcaaattaggcctctggcttacggcttttgacttttgcagtacacatgatgtctgaggtatacaaacttggctggacttctgatcttgcttgatgtttggatgtctgttgttatattcaccctgaagcaaactggggtatgttctgggtttggtgtgcttcactctctgttcagtaacagggtatgaccgtatcttagtttcatttggtctttcatattgactcctattaacctttatatctttgatgttcttgactactggtttctttgatgactgaactttactaagggtccgaataaagtgagagggaaccgtccttgagggttttactcctggtcttgcaagatctgctcctctagagagttgctgtgattttactgggaaagtcctgctttgtgtttctccaacaaattgtttattaaccctatctttcagaacagcactattaactgaacttttgcccaaggcttgtttaggaactaaactgttcttggtttgattataagagtcagtctttggcttacttctggtatataatttaggatctggcttcctctcaggttctgttaagatatctagcaagttctctttgtttgtttcttttagaaagttatccaaagattcgttttcaacatggatattattcataaagtctatacatttaccatttccttgatctgttaactgctgctttgtagttttcaattgctctatattaagtgaccccacaggttttcttgacagtcctcctgtggtggactatctagcttcacactgttgaaaactcttgctgaaaagcttagactatgggttagaagaaacacattttgaagtccgccttttgcccagaagttttggtggctctaacttcagcttctgggaccctgcagtattaggtggtctgggctggagtttaatgctgatggaccttttaggtttgacaggcaaaacaacatggttggtaacatcatttttgggtctaatagtctgaaaaaacaaagaaaatacatattaaaaaatccttaacatatcttattgtttttaaaataataactgtgtttaacacatgctaaaaaaaaaatcatttttagaatttcatctaagaaagttgaatcctcagaaagtaaagaaagactcactaataggtagtttttgtgtttttttttttttttttttttgagacaggatcttgctctgtcacccagtctggtgtgcagtgatgcaatcttggctcattgcaacctctgcctcctgggttgaagcaattctcccaccccaacctcgcaagtggctggactacaggcgcatgtcactacacctggctacttttttgtatttttagtaaagttggggtttcaccatattggccaggttggtcttgaaatcctgacctccagtgatccacgcaccttggcctcccaaagtgctgggataacaggtatgagccaccacacctgtcctaacaggtagtttttacaacttgagttcctatcagaagtatattagaatcttttagcttgacagaattaagcagagatgcagtgaatatacaaaacttgctctttcaaaaatgaatttgcctcaaacagtagttgttgaatgcctattatatcctaagtgccctccaaagaaccctgaaaaaatacatacataatgaacttatgttagggtacctcccaacaaatctctcctagtactttgtatagccacactatatgttttttaaaccactgcctttgtaaacatcacagtatcactcaagaacctctgtctcatccctggagatcagtgacaaggagataggtggcagatgatgtgaggcctgagatatgctgccacagctctcaataaacatgtaacatcttaatagtcatatttgtaaaatcagccaggacagggttttaaggttagagtctatgttaataataaacaaatgtttagtcatgtgatttaagtttggataagaaaggtaggactcgattacagagaattttgaaaactagggaagggagtttagaattcatatggtaagtaattgggcaagccactatgaattcctgagcatctctcatgaaagcaattactcagaaaggagaatttcacagagatttatggaatatgtttccagggtaagatatgggaatgctagagttaccactctatttttgatttgacaaatattgtgaagaatcactacataaacttggcgagtatgtaaaggatttctaaccagaaccatttggcattgagggcaaagaaatgtctactctggatgatagcggtgtgtgtggtgttactaggagtgaaacagcggagttgggagtgggaggcagagagatggatggtatacccacaatggctatatctggattaatctttgagcaccaacatttatatacacctcggatctctccatcattgcttactgaagaggtggagggacgttggcatgaaagcttccaaatgtgtttttttagttgctttcttatatattaaaaacgaattgatataatccacaaaccataaaattcaccattttagtaagtgcacacttctgtggattttagtatagccacactattatacagcaatcaccactgtctaattccagaacatattcatcacccctagaaagagacttgggtttacttgttggcagtccctccccaggtctacatgtgctcgcaagattggatattgaaatatcagcaagaaattaaatgacatagtagtcattatgcctaaattattgttattttttgattgaaaaaagttgaatatttcaaatatcaaggtagtagtgagatataataaagagagagtcagttctaagtatagaattgctgattcagttaagctctgttctccaacatttgggccacattgaagagaccatgtagctgctttcagcctcggtttcctcctttgcaaaatggggattacactacctgcctcacagagatgtaaacttatgacatgttatcatgattgccagggcccacctgttttcttttaaacattgaaatcactgtgcctgaaacagggatttccctgccctttgtgcaagctccagaaacaggagtcagcctgagtcccgcagctaagaacgtggattctggtcattttctcatagcgaacacacttcacaggtccttcaagggagtacattttcctataactcaccttaatctcagttgaagcctcgtttcttattttgcactgtggccaaaaactaaatctcatttctttcacgtaaacttcagcaattcaataatagtacagtcattttatgtttcaactgaaccaagtcagggttccactcctgcctcccctttctgctctgaggacatccatgaagtggagggggtctatgtagcctggagctattggtgaggggcgatgggtccgtggtggtcttggggaactgcggggctgtgtctggctggtctggtgtctggtgattggccttgttccacgcggttcacgctgcaggacagttcgtgtccttcttgtcctaatgatcagcttttaggctcacgggcctgtctctgctgagatatggaataggacagcctctggatcttctttaaactctcctggggccacaggggactctgtttgtgtctgtgcccacataggatgattctgcccagacctttgctgccatttcttgctgttctgctgtttttagtctctggagggcttgcagtttccttggggtccctgtggaagcaaagcaaagtcctctccacgctcagatgtctaaacgtatctgggttttatcgtccacccatcccagagctcagtctagaggagggggcagccttcgggttctctccttcctcccagagcctcttcctttgcaccagggcagcctcttcctatctgttggaaagggctgtctggttcttgaatatagagttgcaggtttgaggggtgtaggctgaggtaaggcaaactatcacatggaataaaaattaccctgtgtcaaggaacaaccagagctggacagtttttaaatgtgaaaaccaattttattcaggactatggcgagaggtgaagtaagacctcagtatagaactgggctcaattccgaatgcagcatgggcaaatgggaatgtatagcctaggagcagggtgggaacctgtggatgaagaattactaaaagggcatatcaggggtgagggggcgtcctggctacacccactaactactgttgctgaagaaaggcctggtgacatcactggggaatggtgggggatgaagaatccaatcagatggatattgaggataaggggatcttgataaactggcttaggagggtttttgctaaaactggttttcataggtaagtccacagacaggtcttggagaaagttcagggacctacggtttgttcgggcagatgctttgtcatctgtcacactggcactgtcacctggctttcctttagtccctcccccccttttttttttctggagtagttttgggagaccagaggagcagggagttagggagagtagtcagaaaaggccagagaaaataaggaggtgtctgtagggaaaatccttaaatcctctaattaaattaatttaatttatttatctgggacaaggtctcactctgttgcccaggctgaagtgcagtggtgtgatctcggctcactgcagcctcgacctcagggctcaagcagttttgccacctcagcctcctgagtagctggggctcacaggtgtgcactaccatgcccgggtaatttttgggttttttttttttttttttttttttttttttttgtagagatgaggtttcgccatgttgcccaggcttggtctcgaactcctaagtgatccatccacgtcgacctcccaaagtgctgagattacaggcatgagccactgtgcccggcctaaattctccaatttttaaatgcttccctgttccctgttccagatttgggatattgactgctgttaaatcagcgatttctccctgtggagaggtagccaataggaagcaacaagagtgaggagtccttatatcgaaatagagggtaagagaagagacagatgttatcttggcagtgatttaagaacagcgagtctgtaagcaaagcaaagcaaggctcccaggtgctgagaaacaatggctttctggggaagcgtctgtgttcagaaccttaagttggaaacatctctgaagatgtttgccatgaaggttttcttctgaagttgagtctttcatcactaggtaggcgtgttttggagtctctatcaaacagatcctgtgtttattaggaagctgtggttcataaagccccatgctaattttgcaggtagcagggtggccctggcctgacccggggacagagtggctgtcctccctccaggcaggaaactctctcctgccacctagtggctgcatacccacatttcaagggagcttctgggtggtgagtttaccagactatggtctgaggtagagttaagcaaaacaaaactaaactgcataaagaaacagaaagaaaatcaggtgttataaaaacaatttggcatttgtttgtgtttcagctccgtgtcgatttattgcttccacaaatagtgccgatatgcaccaggcactgttgtaaaactgaaaatatgtttttggatgtgcccagtctgtgagtattaaacgatggttgatttgaaatttgctatgattcatatttctgggggtaagatgcaggatttctttggggggcctacgatgtggcattctagaattctcaaagaatcaaccctggtgggaccaggaagagctgagctgaggcctctctgctcatgtgtacttactggagatcatggagacaggtgagcctgagtgcacgtctcaccaaagccacagcagagggggaggaggcggaaagagagctctctccatttctgagaagttaatggtaacaatggcatacatacctactttacagttgaaattggaaaccacagcattaagtgtttccaatgaaatttggcaatttgggagttttctgagctgcattggatgtggttttgcatgctgttaggatgagcaagagatgatggagaacatcttccttttgagcttcctcttggacgtgggtcactcccactcatggaattagaaagcttagacctagacttgaatctcaccttctcaaggtgctcccgggcaaatcacttaagatccatcttcttctcctcctgctccttctcctccttctgagtttttttttttctttccaaaattcaaatgacacggtactggtagaagaaaaggtccaagtctgcttttacagctcccctcatccccaaatgtactccgaccccaagatgaccatgttatcatttgattgacatccttctagtttcaactcatttctttgcatgtatatgcacgtacatatacactattttattttgccaggggtcaccgtttagctgcattaatttcttataaaataatctatatttacttatggtttacgtaaaacaacatacacatgtaagtgtatagcttgataagtcttcactgtaaaccaaaaataaaattcgaagcccccccaaccgtctgaatggacccctcttcttggccaagagcattccaaagttaacctgaaaaaactagttcaggtcatgatggaagggaaggttggacatgccccagtatacccttctcccttttggaattcaggaaaagctgaccagcattaacatcaacacagaccttatgtctgataggaaactttgacaatctattccctctgaagcttgctacccggaggcttcatctacaagataaaaccttggtctccacaaccgcttatcataacccagacattcctttctgttgagaataatttaccttgtaacctggaagctccctgcttcaagttccctcacctttccagattgaaccaatgtaaaccttacatgcattgattgatgtattatgtctccctaagatgaataaaagcaagctgtatgttgactgccttcagcacaggttgtcaggacctcctgaggctgggtcacggatgcatccttaaccttggcaaaataaactgtctagattgactgagacctatctcagatactgttgggttcaaatatataacttatgaaactaatacacaaatcaagtcatagaatatttccatcactcctcatctacccccaaatttccttatgcgtctttgcagtcaacctcccaccccatccccaggcaactgcagatctactttttgtctctgcaccttcaactgaccctttctgtgatttcatatgaatggaatcatgcgctgagcagtcttttgtgtctggcttcttttgctcagcataatgtttttgaggtttgtccatgtttttgtgtttgtcaatggttaatttctctccattgcagagtagttttctattgtacatgtgtaccacaatttgtatatccattccattgctgatggacatttgatttgtttccagattttggcaattatgaatagagctaccatgaacacccaggtacaagtctttgtgtggacttatgttttcatttctcttggaatggaactgtcatatcaataagtatatgtttaactttgtaagaaactgacaacaaattatctgcgatggttatgccattttgtttttctaccagcaatacacgagcatttcagttgctccacaactttgccaaaacttgttttctttaatttggacatttaagtggtgtacagaggcatctcattgtggttctagttttctttgccctgatgaccaatggtgttgaacatcttttcatgtgctttttgaccatttacatatcctcttttgtgaagtgtctgttcaaatatttttgcccatttaaaacatttgggggtttgtcttattattgtgttgggagagttccatatttatttatttattgagatggagtctcactctgttgcccaggctagagtgcagtggcgtgatcttggctcactgcaacctccacttcctgggttcaagcaattctcctgccttagcctcctgagtagctgggattacaggcatgtgccaccacactggctaagtttttgtatttttagtagagatggggtttcatcatgttggccagactggtcgcaaattcctgacctcaagcaatccacctgcctcggccctacaaagtgctgggattacaagcatgagccactgtgcctggcccatatttattttttattctttattttgtatacaagttcttggtcagatacaataatacctggtcagatgagataatgagttggaaaatgctttgcaaatgggggagaataatttaaatgttatttatttattaagagcagaggcccttcctgttgcggtcacagaagccgtttgcttcttctgccttttataaaccagcagagtcgagctacacaggctgtctgtgttggctgctattagttaatcagagagttttttttttcttgccttgtcattctaatttgtgacacataattagccacaatatgtgttttcagttgtgacactggcctgggaaaccaagggatgtttagagtggatttccttgattttgcaataattgtgtgtttttctgcatcttctgttaaacacaaattcatggaagcaaaacatggaagcaaagtaccctggacatccccccttctttatgaaattgatttctcttaaatgtaatgtttgcttgttcccttactttaaaagcaatttaagagtttattgagaaagtgagccctggaaacatagatgcatagagagaaaattctaccaccctcaggtccctattgtcttctctcataaagtgtagtttcagggccttttagaagtttcttttctgctctgatttgcatgtttgtgagtgttgctattttaagtatttggatttggtctgcaaatcctatgagagatggcaacagagtagggatctcaaagcctgcaggttgtattaagtccagcagggccttgtatttacaacagagggtccttgaagacattccatatattatgctaggggagtggccaagcaaactttaatgtgtccctatggtgggatatttggggttaatacctgcccttctcttaatttctttttcttttctttttttctttttctttctttttttttttgaaatgtagtcttgctttgtcacccangctggattggagtgcagtggtatgatctcagctcactgcaacctccacctcctgggttcaagcaattctcctgcctcagcctcccaagtagctgggactataggcacacaccaccatgcctggctagtttttttttttttttttgaaacngaatctcgctctgtcgcccaggcgggactgcggactgcagtggcgcaatctcggcgctcgcatccctcatatccatgagtgttctgtgggccctgcctctgaaataaatcctgcctttgtctcccagttcactccagccacccatcctggggctgcaccctcctccttccaagccctctccctttccttcctggtgctgcctgtcatgtcaagcatatgcatcagtgcgaccaggacatttgaaatgcaaccagtacaattgggcgcggttatgcctaccagtttttcttccttaaacattttatatttatgtttgaaagcatgccacctttcttcacttgccaacttgacagatttattagttgacaacatccgctgatagcatcagtaataagttaattgtttttgcacatgtagctttaattattctcattatcatttataggagttattctttgtaaagggtaactgagttttccaaaacaaacagaaatttggggtgggcccatggagcgtgactcatgaaatcagattcttagaaggacctcggcaagtctctgggttgctgttaatgagcctggctggctgccaggggtgtgtctgccctttatgaggccaccactgttcaaatgcttgcctgcagcattacttgcctaggtagtgcttgtttctactgaactgtcagggatccaattctttgtggtctaagtaacaatactcagattcacaaggaattgattaataagccagaatgccaatgtattacatttttgatgaagaccatatttacagtgattgtatctgctcaagctcaaattaggattagagttctgacaaatacatatgtgagaagtatgaggttaaatacttgaaatttggacttttctagaaaatctgaatgtgattgccattcacatacctttctggggatgatgattcttgtacttttattttaaaagacatagaaaactaacttaagaatcagattgcttggctgggcacagtggctcatgcctgtaatgccagcactttgggaggccaaggtgagtggattgcttgagctcaggagtttgagatcagcctgggcaacatggtgaaatcccatctctaccaaaaatacaaaaaaaaaaaaaaaaacaaccaaaaagaataaattagctaggtgtgatggtgcgtgcttgtagttccagctacttgggaggatgaggtggaagaattgcttgagcccaggaggtggaggtttcagtgagctggggttgcaacagtgtactccagcctgggcgatagagtgagactccgtctcaaaaaaaaaaaaatcagattgctttattgctggttttctttctaaaactgagattgggtcccatcatcccctggcccccattggttaatggttcctcctttgtctattgaataaaatacagatgtctgcttttggcaacatggttgaatgtagacactgcagggtcttcctgactcaaaatgagtaaggcttagataaaacacattttgaaatgcatttctggatgaacagcaaggaaaggagatctcttaaaatcctctttctgttcccctctccctaccccctccaagtgggcttaagtaggaagggtggtgagcggcaggtaaacacacgtcaaaggcagtcttcctctctgagggaaaacacttgtataagcattgcaatcaatgggcctctttaattatgtgccagtggcaagagcgggtgctgaacccaggggcctgcctcaatccggggcctttgaggcagaataaagtggtctcaggttgttggcatttccttgcccttccacccgaagcagacacaaatcctctctggaggcaagttccccaattcagccagtacaactcccacagactaagatcaatcatgtacaagctcacagacaaaggtcaccaaacacacagagcaataaacaaattcatgagtgacgtgaatgagaataaacagaaacaataaccaccagctgggatgctctaagtcttcagctgttagaattcctgaatatagaataaaactgccacaatggcaaacatgcatctagtacttactgtgtgctgggttctaagaattttgcacattgtgccagataccgactcagcttcacactcaccctcctactgtgccctcttaatttgcactagattaaaaggtagaaaggaagaggcagctattctgttcttggctgtgcctctggcagcacatgcaaaatgggcagtaacagtggcagtcacaggtaagtagccttctcacagtgtggagttaaaggcatgggactgagacgagcaaggttcctaaagggacagtggccagtagatgaccaggggctactggagtggctgcatggctctgtggaagctcagaggagccttgggtcctgcaggtgcagtagcagctttctgtagttcctgatctctgggtcccacaatcttccccgtttttgctcctccacttctaattttgtaactgacttccctgtgtgtacttctctctctgattgaaatagccagactggtttctgtttcctgataagacattgtctggtacgaacacagtaactcatttaatccgatatctctatgaaggaggtacaataattattcctattttacagatgaggaaacacagcagagaaataaagtcaattgtctaaggttgcacatttagtcaagggaagggttgatataacatataattatttagaaaacatctaaggaaataaaaggcataatttaaaaataaaactaggcaggtttaaaaaaatgaagtaatctataagtaaaaaagtataattgttgaaatacatatcttagtggatgggttaaatagctgaagaaatgattaatgaactggaaggtagttctgaggaaatcagaattcagcatagatagaaaaaatgggaatttacaaaagtacacaggaattataaaagaggttaaattatagggagggtagaatgagaattaacattggtctaactggaattttggaagaagagaatagagagaatgaacaaggcaatatttaaagaggtggctgagaatttttcagaaccaacacaaactatgactttaccagtagagaaaacaatgtacactgaggaggataaataaatatactatgaacaaattgtaataataatactcaacaaagacaaagagaagatgttaaaatcagcaaaaaaagaaagtcagacttagaaagaaatgacaatggcagactactcaacaacaacaatggaatccaaattcggtcaaacagtattttcttcatgctagcatatagcgggagtccgctatgctcctaaagatttgcacctctgatctggtttgtagttagtctcttttattgctttatcctactcaactaatttttttagtgcctgttttttttttttttaatgtgtgttgatgactacaattctaaactcattctactgattcatgggtgctttaaaatctgagcagtctttcgcatttactgcctgtgatggcccatcccaccagctaaagtgtgtggccactgcttacagcaccatgtgataacgagtaagggagagatgccgcccagactcttctaggagcagccagtaggaccttccaggggttgcaagcaaaccacagcaatatgtggagtgtggcagaggatggccccaagaggatgtggcagcggctagtgcagctcagcttagtctgagaggaaatgctggagaggagagcccagtctgtacaggcatgacagccacaaggacttcaacagctaacatggctgagtggactttatgtgctatctcattcagaaaacaggagcaatcagaaaggagtcacctcctatttgtaccccaggaattgctaacctacttgcatctgaatgatgtccatcacttcccttcatcacctcctctgggggctctgcaaggatttgactcctgcattagtgatctgtctcacctacgttgtgattcacatgaacttactaatgtgctatgtgacaactaccatcttaaacacaaaaaccctcttttgattctgtggctccctccagctacccctgcatttctctgtccccctgccccgtctctgcactcacttttattttacagcaaaactactcaagggagtctcagtgctccttggctccatgtctccacctttcattctctcctcagttcactcctgtcaggcttccgtcctcaagctcttcttcacttttgttctagggccgctgacatcctctttcttgccaaattcagtggccaggtcctcacttactcaactgctcagcattgttgggcctggtggaccacattctccttcacccaccttttgctgctctctcttctctccagatgtttctctcttctcactggctactcctcttttgtctcctttgttagctccatttcttccttccaacctcactgtgctggtgtgcccagtgctcagtttttagctattctctcttttccagtggcattcattagatggtatcatgtgacccatggcattatatgccttctacatgacagttactcctgaatatgaatctcaggaaagatttggatttatttttaattaatttttttaaattttattttaataaatgaggtctctctctgtcatccaggctggagtgtagtattgagtgatgtgattatagctcactgcagccttgaaccatgggctcaagtgatcctcctgcctcagcttcctgagtagctgggactacaggcatgtgccaccatgcctggatgactttttgtgtgtgtgtgtgtgtgtggagacagggtcttgctctattgcccaggctgatcacaaactcctggcctcaagtgatcctctcacctcagcctcccaaagtgctgggattacaggtgtgagaccatcctgggctaagattcagattttgtattcaattgactgtttgacatcttcacttggacacctaagaggtatctcaaatattaattaacttggccaaaatacagaacttttgacccctgcccccacaatacttgccccttccccagacttctccatttctgttaaatatccccagttactcaaccctcaaacctatgaatgccctttgatttctttctttccctcatctcctacgttgacgccatcagctagttttgttgcctttatgcccagaatataatcctcaccaccttctctcctattgcccgagtataagatgtcagtttttcctgcacagtccattgccctgacctcctgagtggtttgcttccacttttgacatttgtattcctctttcccccagggtcaatttttcacagcaagagtggcattttttttttttttttttttttgagacggagtctcgctctgtcgcccaggccggactgcggactgcagtggcgcaatctcggctcactgcaagctccgcctcccgggttcacgccattctcctgcctcagcctcccgagtagctgggaatacaggcgcccgccaccgcgcccggctaattttttgtatttttagtagagacggggtttcaccttgttagccaggatggtctcgatctcctgacctcatgatccacccgcctcggcctcccaaagtgctgggattacaggcgtgagccaccgcgcccggccaagagtggcatttttaaaaccatatattagatcattgcttttgtgtttgggaacctccaagggctttgcatcatatatcaagttgacacctctcctacccaagcctggctctttcctgctcctctgtcctctcagcccctccacccattgttcatgctgcttcagccacactggccttcttgccatgccacatttgtgctaagcccacatccaatctcggggcctttgcactcgcatttcctctgcttggcatgctgtaccccagatctttcatgattggcagcttctgtacattcagccacctgctcaagccaccctttcagagggccttccctggccacctcacctgaaatagcacctccgattgcacccatccggttattctccatcctgttctcttgcttggtgattttccatcactgatgaggaaatgaaccatggaatgctagggctgatgaccagaactttcccccacccccacattattacagaggaggaaatgaggtcggaggtaagatgggcccaggatttctactcccgcctggactgcaggcacagcactgacctcagctgtgctcactcttggcattcacccaacccttctatctccaactgccccatttaccagaaagtgaaatgttctcagagacggtgagccacctgacttggacagcagcccagggcccctggcaccctgctttcttcctccctgccatcctttcctctccaagacctacctttccctgtgattcttgcccacatgctgcatttcatggttttatgacctgatttctgagagggatttgaattttcatgattatttatgtaagcaaatcattatgcttatacaaatgagaaaaggagtgcttctggacttcccagggacaaaatcttgtcacttggcttgctttcatattgctaattaaggacccaggatgtgggtgagatgtgctaaaagctgagaggaggctctggactctgactatgggcccacacccctgggcaggcatcacactagtcctttaggtcatcctcaacccagcttccagttgaatcagatgtttgtgaataactcagcaaggctgtatgggaaatgaagaatgaggtggggaagaggcctgtgcagaagacacactgacttacccctctacctctaactagggtgttgtagcagccacccacccaccaagtctgtcttccagaccacgtatgctttcctccacctttgcatcttttatcttctgccagcccagatgcttgctgactccagcccaagcctataggataagctacagcctgtccctacagactacgcattgcagaatctaagacatcaagtcaagttcggaagcacttgccttctcctctccaggtacacaggctctcctggaaagctggtagcagctgtggaggtgtggtgtgttacctgctgcaggtgcagagaagttgacttcacagcccttcagaaagactgccttcttccagttgtatttgtgtacttgcttgggtgtggggaggattctcagctttctccactcaaattatcagaccctttccatttagtggtagaccatttccctcgtccaggccaagggcacatagtacagagaaatagggagttgttacccagggagagaacttggctctaaacctgtaatagaaaggtcagttctggtctggagggtcaattttgatctttggctcagatccaggaattggaaccaaggcttttgaacattttaatgcaggggattaaaaaaatgatacgagtcattcacgaatatatttgcttaacatctaaagagatccctcaaaacactagaaaaaataagaacaaaaatctaataaaacaaaatttgttaaacacatttaccaaatttttttttttggtaaaaattcaaatgtcataaataaagctaaagttcctcttgatgactcgctcctctgccctattccactccaagtaaccactattatcagtcttgccaatacccttccagacctctctacctctatataccattagaagcacatggttttgcattgaggatgtgcagtgttttgttttacgtaaatgttatcactctgttcttgttccataatttgcctttttctctcaatgatttgcttggctatctttctatttcagtagcatctcctttctttttaacttaccattgtttatttaaccttgcctctatcaacagatatgtaggttgtttctagttgatttcattaagtatttataaacaacgcatcagtagatgtccataaatttctttacggaagatggcaagtagtggaattgctgagccaaagaacatgtttaaaaaacccaaaaaaactagacgctaccaattttctctccaaaatggccatacccacttacccatacagagatgatttggaatctggcttcctcacaaggtgagatgccttcacagtttcattcttcctggcatgtcttcccttttgtatctgagagagctggcagaattgtgtcactaaatcaaggatagagggtcaaatgacagctcaagctcacaggcacctctgctttcttcccagaccacctgctttcctgccaccagctctgttccatcttatagaatggttgccacttgggtgtctgctccgacagccatgtcatcctttgcactgcagttatgaagcagacagagctaggagaggggctttgccagcctctgccctagcttggagaatttcaaagaaggagggtattgagagtgagctgccgaagactggcagctccctcaactcaacagttgtccttccacaagaagtcagatacatttttttgggataaaatatttaaaaattattattttatttctgaataatatatttacatgattcaaaaatcaaactgtaggccaggcatggctgcttatgcctgtaatcctagcaatttaggaggccgaggcgggaggatcacttcagcccaggagttcaagaccagcctgggtaacatagtgagaccctgtatctacaaaaatttaaaaacaaaaattagttgggcatggtggctgatatggtttggctctgtgacccaactcaaacctcatgttgaattttaatcctcaatgttgagggagggtcctggtgggaggtgattggatcatgggggtgggttctcccttgctgttctcatgatagtgagtgagttctcacaagacctggttatttgaaagtgtgtagcacctcccccttcactctctcactctcctgctccgccatagtaagatgtgtgtgtttcccctttgccttccgccatgattgtaagtttcctgaagcctcccagctatgcttcctgtacagcctgtagaactgtgaatcagttagacctcttttcttcataaattacccagtctcaggtcattctttatagcagtgtgagagtggatgaatatagtgccatatgtttgtattcccagctacccaggaggctgaggtaagaggattgcttgagcctgggagtttaaggctgcagtgagccatgactgtaccactgctctccagcctgggtgacagcgagaccttgtctccaaaaaaaaaaaacccaaactgtgtaaaatgtgttcataaaagtgtcttgctcccacacctgtccctatatatcttattcctcagcctccgacaactactttattcatttcttatgtatcttccagaatcaaaaaaaaaaaatcaaatacaagcacagtggaatgtattgcccttcttcccctcccttttgttacatcagagttagcatatcataaatacggtctgcattttcttctttttcagctatcagcatgttttggagaggatttcatattcgtgcagacagcatgtattagtcagtccttgcattgctataaggaaatacctgagactgcataatttataaagaaaagaggtttaattggctcacagcttcgcaggctgttccacaggaagcatggcagcatctgcttctggggaggccttaggaagcttttactcatgcagaagacaaagcgggagtggatgtcttatatggcaggagcaggactgagagagagagagagagagagaaaggatgccacatacttttaaacaaccagatcttgtgggaactctgtcacgagaacagcaccaaagggatagtgctaaaccattcataagaactccacccccatgatccaatcaccccacaccaggccccacctccaacatcggggattacaatttgacatgagatttgggctgggacacagaaccaaacaataccagagtgctttctcattcttttctatagctgcctagtattctatgtcctttacttcatttaggcagtctcttgttgatagacacttgggttacttccaatttttcctattacaaatgatgtgcaatgaataattttgatcattttccatttcacatgggttatgtccatctgtgggataaatctccaggagtgaaattgctggatcaaaggggaagtgcacttgtgattttcatagttagcaaattttgttctataagggtcatatcaatttatagtcccacgcgtaatatttaacagtggggatttcccgacagtttgaccaacaaggtctgttgttaaacttttgatttttgtcaatctgatgggaaaatactagtatctcaaagtgcttttaatttgactttcttattacaatgttaagcatcattttactctgcccaagatcaaatagtattttcttttctgtgaacagactgttaagatcccttgcctcttgttttgctggatttttgttcttttttttcaaatgttttgaggcagttctttacatgtgaaacaagttatctctttatctggggtgtgagttacaactacttttcctctggcttgttttgcgctttgactttgcttctggtgattcccgcaattctgaaagtgtactttttgcatcattcattcttatacacccatgctcttgttcacgctggttcctctacctgagggctttttcttttctgcttctatctgggaacatttttttgagagagagtctcactctctcgcccaggctggagtagtgcaatggcgcgatcttagctcactgcaacctccacctcctgggttcaagcaattctcctgcctcagcctcccaagtagctgggattacaggagcccaccaccaagcccagctaatttgttgatttatttatttattttttgtagagatgggagtctcactatgttgcccaggctggtcttgaactcctgggctcaagcgatccacccacctcggccacccaaagtgctgggattacaggcgtaagccaccatgcccagcccatgtgtggaaatcttctgtttatccctttaggcttgattcttatgtcgttctcctccctccttcctggatactcctcttgttctttatcttactctacttgtcatgttaccttgtttctgcttataactagctgcctctcctatctgaggagggacttgtgactgttctcatctctgtactcccagctcctagtacatagcgcttgctcaacagatgtttggtgcattgatagataaatcactggtagctgttactaccagtcctgactccctgcagtgcttcagctgatcctgttccagatgtgcactgaatatccttctgttgaacaacagaaataaaggggatgggtgaggaggatagtcttcggtggccaaggatatttttaggtactttgcagcactcagcaatgaggagtgggctttagtcccccaagaactctcacagccctgggtgtctttactgttcagtgtcaaatccaagacaagtcaatgatcaggaaagaccatttttttttgttcagtgaagtttatttcagaatcattgaacagtatgatatttggtaatttcataaatattcccacttaaaatgatcggagcagatatattttcagtcgtaattaaaggacatgatttaaagagagcacaccagtccaaattgaaatgattccatagctattaaaaaactagggttttttacagacaatgatactttttgccccctttgaatagattagaccaatgaataaaacaaacaaacaaataaataaataaatagggaagcggttgctcatcagaatgtgggagcgaatgacagagggtttcttagaaccaaatgtggccgtggtttctgtcaggcgtgctttaagtgagtaggagaggtgagagaggcctggctcaacaaaagggctggggattgtccctgaagaaccagagctganttncatcaggagtaacanaggtagatagccgcgttgaggttccacgcagttcaaattatgtccaattatcaacattaatgcacattttcaatagaacctgttccggcttttcttaggaggggggcggggagacgttgttctctgggaataagtgtacgcaggaggctgagaaggcttcattccatagcattcacttacctccagctgtagagtgggcttatcatctttcaacacgcaggacaggtacagatttttttctttgaggcccaaggccacaggtattttgtcattactttcttctccttgtacaaaggacatggagaacaccactgaagaaagaagggggtcttgtggttagggacacagcagtgcagggtcaccccaacccctaggccccatgagtaggatacatgtaatttggtagcctctgtgggaacccacagtgaggttccttggcctaagacacaggataacttgacttctcacagacaatagcagggtcattttgttgatttagggtttcccctcaaaggcctgagggtttctcagagcctcatagcagtaggaacggagaatgaaagagggtctacattttaaatgctgaaggaaggaaggaaggaagccattgtgtcactggctggcaatgtgcccatccacaggagcggaacaacttgatcaatgtggaaggaaaggaaagaggtgaggctgtacttctgccagaaatcaggcaccagaactgtttcaggaacagagagtagcccatgggaagaaactgggagaggagaggctgagctgggaaagtggctccaaagagagacactcattttgatcttcctcagtcacagcagtgtcaattggaggccctgggatcactcttactacccgattccaaagaaacaggattttcttggcctggctgagagcaaatagcttccccctgagtgaggctgtccttcaaagtcagcagccttagttgcccacactcctgtgcagaggctttggctactgtggcacgatgccaggcagatcaccacagctaatgatgggttcaccgcacttgaaacttttgcccgttacagcggagagatataagttcctgctgggcggtaaaatttccctacaaggaaccacctggcattgggtgggacggatgttggggcaaggggggaagactggggagggggatggacacattatcgctccagcactcttgtttcagcctcaacaacaggaagagagaacccacaggcagttaggccatgtccatcaaatgaccccatattgtggaagaattgacattgcactatgcccaagagacttgggtggacatggtcctgggagtgcttgagccgtctaatttctcagggtcacactcctgttaacaaatgcactggccagtgcaatcaaatgtgccatttctaggaccaaagtttgtatattcctttttaatattttttttcacttgtgttgatcatttgccttaaattaactttctactttgtttaaaacatggagaattagcaagctgccaggaggccaggcagggaaaccaggatgtttccatttaccttgttgctccatatcctgtccctggaggtggagagctttcagttcatatggaccagacatcaccaagcttttttgctgtgagtcccggagcgtgcagttcagtgatcgtacaggtgcatcgtgcacataagcttcgttatcccatgtgtcgaagaagataggttctgaaatgtggagcacatgttgtttaggtataaaatcagaagggcaggcctcgtgaggcgaggtggcaaaatttgatttcttggaggacacctgagcatatacggtcaaagtctgatgacaacaccagtagggatgaagctgggagtggggtggctaagaacactggacctgacactattagacatgggttccagcttcaggtctattactgctcactgtggccgagcaacagagctacttaggtaaaatggtgatggtcataacactagcccacagggaggttacgaacctctggtgacaatgtaagtgaaaggcccctgagaaagagtgagggagttgcaaatgtcagtagccatcaagatcttctttaagaatagtttccactaaagagatgattgctttggtttccagccttctttgttttgtctccccgctgggccttctacctttaaagggctttggctctgggggaattgagttggctggggcttgatgacttccaagaggacacaagtggagatctactgcctgctcttggctaactaccttcttcaaagatgaagggaaagaaggtgctcaggtcattctcctggaaggtctgtgggcagggaaccagcatcttcctcagcttgtccatggccacaacaactgacgcggcctgcctgaagcccttgctgtagtggtggtcggagattcgtagctggatgccgccatccagagggcagaggtccaggtcctggaaggagcactgcggagagagcgagggagggagcctggtgaggtggtcctgccaggaaccatgctttgacatcagagagtagaaagctcagagaggaggaaagggcttgaaagaatcccgagcttctaaagatcatccctctctgggccaggcgtggtggctcatgcctgtaatcccagcactttgggaagccgaggtggatgaatcatttaggtcaggacttcaaaaccagcctggccaacatggcgaaaccccttctctactaaaaatacaaaaattagctgggtgtggtggggtgcacctgtaatcctagctattcaggagactgaggaaggagaatcgcttgaactcaggaggtggaggatgcagtaagccaagattgtaccactgcactccagcctgggcaacagagtgagactctgtctcataaaacaaaacaaaacaaaacaaaacaaaataaaataaaataaaataaaaagattatccctctctgaagctcaaggaggttaagggtgtactcaagggcacacagcaggttagaggcagactcaagattagaatgtgggctttctgacaccttacaggctattcttttagaataaatcccatttctactttgttcatcttttttgtacatgccccacctacaccatacatgtataccttctctatatctttttgtatccctaatgctgtcacactatgatttgctttttcatgcagatgaccataacattttccattcacctatgctcactcagcaagtattcaatttttctacactgttcttttttttcctttttcataacactgtctcataggcattctgcaaatcctgtgagagtactttttgtgaaatgttaccactttcctcttattcagagaagctccgtattaaggcttcactgaggttgccttaaggcatgataatggttcaaaggcttgaaagacagttaaagagacctgtaagtgcacaaaagaaagttgagcaggagagaatttcctgcctggagcagagccaagctgctggaagaggcaatgggggcaaaggccaggcagacaagccaatgggctcctcccacagctgcagccaacaagttatgccagtcttaaaacttctaaagaaatatgtttttaacaagattgaggactggattatgaggctaggggaggctatcacaaactggaataaaataaagccagagaaaagtggctgccttccaacctgcacaactgacctagctaggctgatggctgggccacctaggaaggctactgagcatcatataaaacagaagggacagcaggaatataacatggctctttgtaaggatgagtctgaaaaatgaccatttgctgcccaaatgcccttagctacaactgaaaatatttcagaactggaggttgcaggatgctggaatctcagagatcatccagctcagccctttatttttcagatgaggtccaaagcgggtaaaatgacttgtcaaggtcaaacagcaagtgaatggttttctttcaagtctcaattcatctttttgtttatatcatctatgtcttgttgttataagcttcaccccaggtagcaaaaaactattctactcaaaaggggtagacatatgttagttctcaagatcatctcttggtttcagagtttaactcaagtgattggcataggctgaatccatctcttaaaaggataatcaaatttatgttgaagacttggttgtcttcctactatgaaatgggaaacattatcactactcctcccctgtcaccaccaagtgtggccaccaccaccaacgttagtgagtgactgtggtgatatgatgaccaagtggccaggtcagcaagtggtgcagcctgtgtctcactggaagaggttaaagtctttctaaaacaaaataccatggcatcaaagtggcccagaactcccttctttgagctttccctgtgttagagcccttccttgggttgggagttaaacccatagtcttaccttcatctgtttagggccatcagcttcaaagaacaagtcatcctcattgccactgtaataaaaacagggacatgtctcaattatgtcttctaaacaggtttatttttccttccctgtgtacaagacttgactgttcataagaaactgcaaacagcctgcctctcaaagctgcctgaaacacctggcaagtttcacagtgatatgcgcagaacagtccagaaggcagattctaggcctggcaggtgggcaccctgggtgctccctgttggatcttgaggcctaacctctagcccagcagagtcagctaaaatctgagctctccctctccctccaagccacactttgcaaagggattccttgtattgtgggcttggaatcttttctccccatttgcctctgcaggaagcccttgcaacaacacatctggatagcctccaggtcccaaggctggagggacttgtaatgggaaagtagtctttaaatcagatttacttggcaccctgtttgccactgaaagaggcaatttaggggaaaaatctggtctccaagcacagataacactctactcttgaaagaggagacctgctcatgttactggtctcagcgtctccactgacctgtaataagccatcatttcactggcgagctcaggtacttctgccatggctgcttcagacacctgtgtaaaaaggagaaaatgagtgacttccccatgacggctacgttcatgtgtgatttctctcagcatccagtgcatggcagtcatgcaaagaaatgatctctgagtaaatgaatgaatgtgtgaaagagaagtcctttgggtctagagaaaagcatttgctaaaccaaaccccaactagcaatgtattggctaggagagctggagcagaggctttgacactaacctttagggtgtcagctgttagataagcagtatccattcccagaatatttcccgagtcataagcattatattacacctggcatttttgcaaaaagctgagagagggaggcagagagggaaggagagggagagacagagaaagaaagagagagagagagagaatatgcatacacacaaagaggcagagagacagagagactcccttagcacctagttgtaaggaagattaaagtcatacttgagcaatgaagattggctgaagagaatcccagagcagcctgttgtgccttgtgcctcgaagaggtttggtatctgccagtttctccctcgctgtttttatagctttcaaaagcagaagtaggaggctgagaaatttctctgttgaatacctgatttcacaatcaagttaaaggaaaggggaaaagagtattggtggaagcttcttaggggaggggactaataaactgagataattctctggttcatggaagggcaaggagtagcaaactatgacacattttgcaaatgtatcaccatgcaaatatgcattgttttcctgacaatcgttgtgcagttgatgtccacattaaaatactggattttcccacgttagaagaatgtttaaatttagtatatgtgggacaaagtggaagacacacagatttatacatgcacatacttttcttcattcacttctttgtacttaagtttaggaatcttcccacttacagatggataaatgggtacaatgaagggccaatagccctccctgtctgtattgagggtgtgggtctctaccttgggtgctgttctctgcctcgggagctctctgtcaattgcaggagcctctgaggagaaaattgacctttcttggctggggcagagaacatacggtatgcagggttcaggctcctgacggagttggggcaaccctggagataagctcacacaaccctgcaagaccaggtgctgttaccctagccaatctcatggatgaaccagatcaatgccagatgagctctgcctaaaatgattttttggtgaactctgaaaagtggaatattgtttctgtaagaatatccatctgagactctatctcttggtaataccaagagttatcagtttctctttaaccgagacaccagcaaagtgcctgctccagggtaatgcccaggggagccctccatttgtagaatgaatgagagtccaggttatgaacagtgcctggagtgtaggaacaccctcctttgcctctttgacaggtctgcatcataacactttttttttttttttgagacagagtctcactctgtcgcccaggctggagtgcagtggcacgatctcggccccctgcaagttccgcctcccgggttcacaccattctcctgcctcagcctccccagcagctgggactacaggcacctgccgccacgcccggctaattttttgtatttttagtagagacagggtttcaccatgttagccaggatggtctcgatctcctgaccttgtgatctgcccgcctcggcctcccaaagtgttgggattacaggcgtgagccaccgtgtccagcctgtaacacttcttatagcactgagttgaaaccttgctcctcctggttcctccaggaaactgaaatctttttgagccaagtctagcacagtgcctggcatgtacattcaggtggtagagtttgctgcttgaatgggtgaatgggaatttgacagcatttttattcaaattagtatgtgccaggtatcgtgctcgctctgcattatccaagggagtgagcctctgtgcaagtatttgagacacgagggaaataggttctactgtgggaaaaagagcatttcatggacttgctctccaagcagccttctgatttttaatttggctcccagtatcttgatatcaggagtcagtcacaagaactccatctttagtaagttatattttccacaggaaatctaaaagctgttcaacatgttagtttcctgtgaatttgataagccataatccattcctaacactgagccctcctgaaatttggtgtctggtcctgcagatagctaaaagccctgtctgggtggcctagggactcctctgttttgcctccacaggatccactttgcaaattaaccactggttctcccgttgtaggaactgccaccttcctcagagcctgtctttcttccttccttccttccttcctctttctttttctttctctctctctttctttcttttcttttctttctttctttctttctttctttctttctttctttctttctttctttcttcctttctttctctttctctctttctctctttctctttctttctttctctctccctccctccctctctctctttctttctttttctttcttttctcttttctttctctctttctttctccctccctctctctctttttctttgtctctccctcccttctctctctctttctctttctctctctctctctcctagacaggatctacctttatcccccaggctggagtgcagtggtacaatcatgcattcattgcatgatcacagcagcctcaaacccttcctcagagtctttatgcggcaaccagcagggtctggagggttggtggctctgtgaactctcctgacagaacacagagatgtctttggtctgttgatgtgattacaagctgaacgaaggaagatcaaagccagtgacaggaagggagatatgcaagggacccgagcatcagctctgagttagtccattctgcttctgggacttgggatacaggtcagaaaccttgagcttctacttctccatcttccaattgtagcatccaggacctcagaatctgccagctaagaggagccctaatgattgtctggtgggatatggtgggaccacagagatgaagacatgaatagctatttgaatgtgaacagcagacgaagaaatcaaggctaggagggtggaagtgactcatccaatagcacagtgtggttgaagcagcactagtatccaggttgcatgagcccctgatgctttcgctcgagggaaattttggagccatggggcaatgccccctgacgtaacagtctccacagttctgccatgtctcatcctggccctgtaacctggacccaaatctgctaccatcccatccatctcaggaagtgaaacctcttatgtcaaataggttgtgcaacgtatgtatcagatcctgtcttcccaaggagaccgctcaggccacagcacttccttccgatccccaatgagcagaaaatatctcgctataaacatagttggcactaagggagggagtggaagagtgatgatgatgtagatggtgatgtagccccaaggaagtggaacaagcagagatggggagctggaaatgccaggatgctccagcttttggggaattattcagctcttgagtcactaaagcctttctcagctgcaagttcctctttaccctgtcaggtcattcttccaagacaggagactgacatttattcaaagcagcaagtgccctgataccatcttgtgtctaatcatgggcttcgcagccagttatcaaggttgatctcatctcattggtcttcaatcattttgaacaagaagacaagcaaaataatcatgggttagttcttatattattgtgtgtacatgcagtgatgtctgttctttgtagtgagctgttccttccttgttcaccctcttgcttagaacagaactaagcaatctgcccccaacattttccccaatttcccatctcattcttggcactggcttcctaatatttgttcttatgagtcattttcttgtatcatttccatgagtccctctgggatcttaaagtatgaaaaatgttgtgtgtacccacacctgtctttgtggatatttctctcctttcccttctgcttctgggattatttgggaatgggcactatgatttttatcatatcgcttccacttcctttatggcatcatctccaatgggcttcttctccctcttggatccaggttctcagattggggacatgcagagtccaaggaacattccattctcctccctggtctagaacaaggagggcttagatatatgagcaggtggctggggctggcgagctatgtagtctccaatggcttttccctgatgtcggagttgttatgtcagttctgggagaccaataagaccttgtccttcctttggatccatcagaaaaagcccctgggtgggtaagatggatggcagggctctcctactctatgtcttttctcacacctagtgggtataagagaggggaccacaaacagagggggctctggtaccacttatccagggtctggaaacattttctgtaaagggccagataataaatgtttcaggtacaactactcaaccttgcatcatttcagaaaagcagtcagataatacataaatgaatgggtgtggctggacttgtcctgcggtcccctgtcttatatcattgtattatatcattttttcttacatacaaatttagaagcaatacttaaaaaaaaaaagccgtcctttattgagcacctactaagtgccaggtacctttttttccctcattatcttattaactcttcataataacctttaaagtagataatattgaaccatttgacctatgcagaaactgaggttgagacaataaattatttaagaccgcacaaacagtaaatgctggaactacgactcaaatatgggttaactgaaccaaaaccagatctttatttctcacttttaattgttacatatgtttattgcctcatctcctgtccacatggtgcccatcggcagactcctttctcattctcagtgattgagtgacattctaaactacattggcctggcagattcacctctgtcccctaaatgtttccacattgtccttttaggattgagatcctctctgttcccttgtcttccctcctttcttcttctggcggtgacgtgctgtgtgaatttgtttctttctcctctcagggtagtactgggactttccaaatcagggtttttagtgatctctcttcccttttctgagtttcttccttattcccattcactttctcatctataagtggcagctttgttgctggaggatttcctttgtccttttattcttctttaagactttgtcataactgtcaaaagcaatcccttgaaggtatctgtccttggaattgtgtgcttatgatgctgaaaaatactctcttcctaaagctattataaatgctggctagctgcaactcttgaatacaaacacattcagacatgcacacactttctggctcccaaaaagaaaaaaaaaaatcaatttataataattctgatcctttgcttatttccacaaactccatgaaaattgtacattgtccaagcaacatttcttaatattctctttttctctcatatccattttccttactgctgtctccacctatctcttccaaactccctgttaaaatccctgccccagcgaacttttattcaattttgtggaatggaggctgcactgatttaaattaaaaaaaaaaaaaaaatccctactccatgtcccagatccctagttgttttttgttttttgttttcctgagacagggtcttgtgtcttccatgctggagtgcagtggcatgatcatggctcactgcagcctcaacctcctgggctcaagtaattctcttgcctcagcctccccagtagctgggagttcaggtatgtgctaccatgcctagctaatttttttcttttattttgtagagacacggtcttgccaggttgcccaggctggtctagaacccctgggcggacgtgatccgcctgcctcggcctcccaaagtgctgggattacaggcgtgagccactgctcccggccttgggtgcaaatttgagctttctcacttattagtgtaagacatacagctaatttctaaatcttccaaacctcagatttttcatccatgaagtgaggattattatagagctcactaataacatggcttcaaaaatatataatgccaaaattgagatcaaaataataaatctatattacatgggagatcttaatgtacctcttatattattgatagactaagatgatcaaaaaaatagaaagagagcagtaaggagagcaagcatttaatcaataggaccaatacattttaatcaataggatcctcaggaatatatacagaataccaaacctaacaactgcagaaaacatgccaaacatttaggtacagacattgttggaaaatgcaatcttgaaacgagtggactgacattcagaagatattaataagagcactaatgatggggattgcaaccatgtctttactgacttccagaagcttcttacagtaaacatgaaatcacataatttcttccactttcctactgtttcttgttctgggctctgtcctgcttactgtctaatatcttggccccttaaaagttgctaatcttccaaacctcattcctgtgactgggccgctggtccttgttcatgggccttgaaaatactgactgtacacttatctggagcatccagtgcctaccacctgacccagattcctcattgcgctcctccctcctccacctattggaatttgctcatacccgtgtgagacccctccctttccccccatctgaatttttatcaagacaacgcactgccatactccctcgtaccctgctctgggcatcagactgaatgtttgtttccattgaggatctgcagctgcatcagtttccccagcaccgtccaaccccttgagcatggctagtcctaaagcagagaattagcctttctatccctgctgctatacatgctgggacaaataataagaaatgacagcattttatgataatgcaggctgcaggaggcaggaggcaggaatcaaattcgtgcttatcaaatagtgctccaattctttgaatattggactatagaatatgtcatggatctatgctcaggtgggttccctattactcactccactgaggccaggttgtgggattagctgtccaagagggagtttcagtctcacagcatagggtcattctgagaattactggcccacacttgtgtggagacctccagagaacagaatctgggttggtgccatgtacttccaggaggagagaagtggcaggatgcccagccccacaatcagaggggaaggggcagagccacatgtatgaagatcctctccccagtacgtgccaatcacagggcttcctagcttttgggccaaggaaacaatgtgggaagcaaaaaaggacaattttctcctccctttgcatgaagactgagcagttttaccagattcccagggaaacacccttccactctgggttgaatgtgagtgagagacattcagctggaacactagaaaaactatttcctgagccactcacctttagccctagaaagtgttggatttgtccttcatctttgccacagtagagactgctgatagcatcagaacttgggctctggaattagacagatatgggtacaaatctgagctctctcacttattagtgtgggatgtagagcaacttttaaaatccttccaaacctcagacttctcatgcatgatgtgaggattgtaatagggcccacctaataggggtttttgagaattaaaaaagttattcaatgaacagcatttagcaagatgcctgaccattgagaaaataacaaattgtttattattattgttattattaaacatctttcctgcaccttctgactgggggcatcgtatcatcagaaatacttaggatgggatggattcctgcatgggctgagtcaagggtgcaataatggaggagtgaagaaggaagaaatggaggcagaaatccccaggagcccagcatggtacaaggctgagctagtgctgcagagcctccttggaacagccacagagcttgcatctggccctgggaggaacctcttctagctggcaggaccagccacaacagtggccaggggatttcccagggcgtgggctcctaggagttcatttggaccaagcctgcctggagaggggttataacagggatccttccctactggcaggtgatttacccctcggtgagaagctcaggcatttgtttgatggaaggtggaaggccctgtgctgggccagtgactatcagggatgggcgggtggctggaaaatagcaaataagacaatatgataacacagttaaccaccacactatgtgaagctacaatatgggtatctgtaatagacaattccaatgtagagaataattctaaggtgtcattctccccgccaatgccataagcacacggcctctgcctgggtttctcactgtggaatgtcctcctggtctcctcatgcccagagagtgggaagtactcctactttaacaccggctttcctgtcatctccctgcagccctcctcagccccctctgcacagggaggtttcctccctgctgctgcagtgctttgtacttgttagtggtacctgcacacaggtattggtgtccttgtctcaccaccctacatcactgtaagctccccaggagcaggcttcctgtttgactcacctgtgatcctccacctcccaccctgtagtgcctcaagcattgaggacaatcactggctgccccttaacccagaaatgctgccgagacaggaggccatggcccaagttcctggaatggggtattactatgtcagcacaaaggcctttgcacaaatgaaggctttaaaaatgcagtcctagtcaggtggaggagggcttataggattcccaggaatctggatcattctcttgagagctttcccttgtctctgttaaaactcacatcctacggcccaaataacaacaaaaaatggatgtaaattcttgaaataacttgtggatgggggaacaaggcccaccccccagatctgccagaagcttcaggtgagggtcccaaatgccaaaaagtctggtatcagagaggatggccagtgacctggggacacatgccctttgctgtgtcactcaaggagcagcagcctcggccccgcacagtgaccaggaccctggcttcccacgctgggcaggagctggtgtctgatgaagggaatgcctggcagcacgtgctgtctgtctcctcgtgtcagcttacctggctttgctgcgaagaggccactcgcatttctcaattttttatatttttttaattttttaaattttttattttatttttatttttatttatttatttatttttaatttttttttaattttttaaattatgctttaagttttagggtacatgtgcacattgtgcaggttagttacatacgcatacatgcgccatgctggtgcgctgcacccactaactcgtcatctagcattaggtatatctcccagtgctatccctcccccctccccccaccccacaacagtccccagaatgtgatgttccccttcctgtgtccatgtgatctcattgaatttctttaaaggtggaatctctcagtggggtctaatctgttcagaaatatcaaaagagtatccttgggaatgactggaattccagagtcatctggtaatcctcataaaacaactcctggatgtctctcagcacatctcccaccttgaacgcaggaggctggttcaaatggaggagcatcgctctactgcacttttttttttttttggcctaaagtgcaaaaggggatacgtttcatgtaaataaatcaactgcaaatcgctagttatgctgagccctgtcccgtgctgtggacacaaaggaaccaaaggcttttctccccgcccaacacacacataacacacacacaaaatcataaaaacatacatacccccaacacataacaacacacaacacacacacaaaatatatacacacaacacacaccaaacatgcccacaaacctgtgtccagagatagatcctactggtgggtttgtggtctcgctgacttcaagaatgaagccgtggaccttcgcagtgagtgttacagctcttaaagatggcatggatccaaagagtgagcagtagcaacgtttactgtgaagagcaaaaggacaaagcttccacaacccagaaggggaccccagcagggttgctggttggggtggccagcttttacttccttttggcccctcccatgttctgtttccatcctatcagagtgcccttttttcaatcctccctgtgattggctacttttagaatcctgctgattggtgcattttacagagtgctgattggtgcgttttacaatccccttgtaagacagaaaagttcctgattggtgtgttttacaatcctcttgtaagacagaaaagttccccaagtccccactggacccaggaagtccacgtggcctcacctttcaactccataatggcatgaaaatacatatgttgtacaaaacatacatacacaaagtatacatgcatctccccaaatatacacataccacagaaacatacacacaggaactcagctacctgtcaaaagtctgcatggtgattgcctctgcagtgagtagttagaaaagtgaatttgtttttcaataaattggagtccttaaaaatcgttgtaagatagaaaatttttaaaagtatataaaataaaatatgtatgtcctttggtctagcatttacacatgtaggaatttatcctagtggagtaatcaatgatatatgcaaagatttggacaagcatattaagcacagaattatgtatgcatatgtgtgtgtatatatatatatatctcatacatataataatgtaaaagtgaaaataactcagatgttcaaaattgaggattagttagactatgatctgtccatatgtgacatacaagttagctgccccttattctctcgagcttcaacctcctataaacagtgtcccttgtatatcagtattggtacagataatcgaacttattgaggttttacatggggcaataaaggcaagagtttatgaatactccatactacactaggtagcaccccctattaaagacaaactcttctctctcatttcccttcctttccggaaccacttggttgaatctctacaagtctctattgcaactgcctcaacatggcaccctccctgcatctccatcttccctgtcctgagagcaatggcctgctgcccccacactcacatcctcattcattccagaagtgagcaccacagaagtgcctacagttaccccaaccaccttcttagaagataagttagtgtttgttttgactttttaaaatttttacttcctcttttccttcacaatctcatcccatcccaagaggtttatcaagaagttctctaaagatatgtgtctccttatggaatttaacagaaatcagggatttgtattctagccatcaagggaataacatttttccaggtctttagacaaataatggaataccttgcagtaattagatacactattgtagaaaagtattgatgaaatggaacgatgtttgagatatcatattgagtagaaaaggcaagatacattaagtaggaaatgtatcttacaaaataatttgtcagacacactcctatatttgtatgttatataaatgcgtatgtgaagaaaggctagaggatgagaccacagtcttcggtgaagtttaagagatgatgctgcagcatgctcagaaaggcttggtatagttttttccagtaattaaggactgatcttaggtaaattgtccatcctctctaaactgcaccaccttttgtctgtaaaacaggaaggatggtatttacccccagggtcatcaaaggatttggttggagaaaaataaataaatgggctgagcccagacctggcacagtgagagcacagtggttgactattgtgctggcctgttgttcctgtgttattgacatgctgctggtggtggtccagaagctattaccttaattggttatgtggatttcccctcatactgagcagctgtgtgtggtgttgtaaaacatagccatacacagtaactgacaagggcaaatgtgatggaaaaatgcaaggaagtgcagataaatagctaatgggctgtagaaggaagctagtccttggagggcttgatcaaggaaggtccttttgcatgtcacctttgaagaagaggggacatagaagaggtatagtgcatcccggagtgtacctggaagggaacatgaaaagaggacatttttctctgggacatggggactccacttgcatgaactctggaattggggcaaagaaccatcatgagaacaagggcttccttgaacctcccaggctcattggctgatctaaaccctgtgtcccctctttccttcactctcctctgttttctatacctgtattattggactggactggaagccacctgatctatcacaagtaccttgaaatgtgttgaataggtgtggcacagtccttagcagagtggcactacccccacaggaatttgtttatacctttggcatggaaaatagcaggaaatgagtgatcactgataactgaggatgctatttattattggccaaaggaatacttgtgttgtatttgcataaccactcacaaactgttgattacaaatgagtaccagacctagctccttcaagtaaaggatcttgagaactgaaggcaaacagagctccaggagtccaagacagagccacagaccacgaggatccctggcccaggtaggtggtcctcctgcactggctttcaaggccaacaggatggatggggaagtagagtagcatctggccatctagacccttgctttttatccccactggaagcacatctgaatttctaaatatgatctctgagacctgcccagaacaccttgctctcagccccagtagcagcctgctctctcccaggagggcttccactaacaagtagggcattgctggagggccaggcagacactagcttaggaaatccaccaaccctggaaatgctagtcccttctctgaaggctcagaagactgactttagagtctagaaaatattggtccttgggaacagattttgagtgcaaagagatggacttcagatggccagatgcactgcttctttagggaattctgtgaaagctccctgcatttatcttaatacaggcagcagatttcatgagtacccccgagggatggccccaggtcctccagcctgtgagcatccttctgtccttcagcagcaccacagtatctttatatgtctttggatacctacgtttctgccagacatctcttgctctgatgttctggctgccaaattctctgtcaagcgcctccaattttttgtgtcctttgatttaccccaacatgacaaaggcagttgtgcttcatgtattcagggatactgccaaaccacaaacaggttaaaatcaaatagcagatatccctgttcctaaagacccatcagctctacccacctgctcctgctcaccgtccttattgttgagtcctgaagcccttccttgtcatttttattttttgcatgaacaatttagttccctttgtctcactcctaaacctttctcaaaggattggatttgtacacaaactgcctatctctgcaatcttagaagtgatatgattctgaacaaatcacttaacttttgattttttattggtaagatgggaataccaatttttgctccacttctgtcctatgttggcctgggctgatgttgaaagctctcggtcaactgagatagggtgtgcagaatttatatatataaatatatctcctccaacccctcccaatgaagcaagtcacgtgagtcaatcctaccctaagatattagggattgagcctcctgggacatttggtggcttaggttttcatgaaaagaggttgcagagcaactgctttttgttaggcaaagattaggctactgcagagactcagcaaacttctatagaaggtgtcagatggtaagtattttaggctttgcttgccagatgatctctcaactagttaaccatgctattgtagcctcgaagcagccagagacgatctgtaaacaagagcatgtagtgttggcataaatatagtaccgcggcaataagtctatttactgtaaagttaatcaaatttacatttcagaacacttaatctgcaagagtcctttccaagaccctatacctaattttgtgtttacaattttatatttgttttcttaaagaagaccaccaatataaactatatccagccttcatgataagtacataagaaactatgcaaataagggggaaaaaaaacaaagaaaaatacctagtttactaatggttcacttctgaatagcacatattcataatgatacaagcactcattactagtctaggaaaatgaagatataattgcattaggaagatcaagaggtaggaaatgtggatgtgtgtggtatagactagggcaggacaaagaacctaaatcctcattttctaaagataattgttaatacgtaaaactcaaaattcaagaagtaacagtaaaagcggtcattaagaaacaagcactaaacaccagataggaagcgagagatgggggaagagggcaagaatctgattattttttgcaacaaattttgtaaaaccatttgactgtttacatgtagaacttggatcttttttaaaaaacacaaaataataatactattattttttaactggatttttgaaaaagaagataaaagtctcattttagtaattaaaactcattccaggttagtccactcaaaacttatattcgaaaattaaaactttgggaggctgaggcaggcagatcacctgaggttgggagttcgagaccagcctgaccaacacggagaaaccccgtctctactaaaaatacaaaattagctgggcgttgtgcatgcctgtaatcccagctactcgggaggctgaggcaggagaattgcttgaacccgggaggcagaggttgcagtgagccgagatcacaccattgcactccagcctgggcaacaagagtgaaactccatctcaaaaaaaaaaaaaaaaaaaaattaaaacctctggaagttgagtttgcagatattcattatgctcatttttaacttgtatgtttggaaaatgtcatgatgagaattgaggttgggggatgagaaaaaaagaaaaacatcaaccccacagcccattcaattttcagcccgacccacagctccggggaagggcagcaggtccatccttcactctttcttcacctctttcccctccttctggctcttccacctctaagttggagcccaagaagaggcactgggaaatggaaaagtcttttgtacgtggtacttgccggggaagctgccatgaagacctggccccacggtggggagggaatgcccagctgaggcctcgtgcccatgctaggatagactcgtccagacatgtcaggtggtctgacagggcaagcagcaggaagtcatgtatgagtatgaactgatctgtatgcaagggcggggagaacacgcggaggaatggggcgtgagaaaacagcacagtacgtttctttagcagctgtctctgctcagccatgggagtcaccagagaaagaggcttggaggcgttattttcactgtgagatgtgagtgtaaaaaagtgcccaagacacagtgagtaccagggagatgccctctttccctacccgaatgcagaatggccacaggccttaaaacacacacatggttcctcagaggagagaggcctccacagtggacacccgcattctcccctggtcagcagcagcagggcgagtgctgggccatcatgaagcttcacaggcaatgagctctcagcaataacaggaacagtgcctgggggactgtagctgcaagaccgattttcatgtaagatggcctctgaggactccgagatacaccaggctgagactagctggcagctccaagttcttggtcagaagagaacaggaactagggaaattggaattactgttactacaattcctttacatccgcacaaccatgaggtccagagagtctctcttattttttttttaaagacagggtctcactctgtcgcccagcctagagtgcactggtgtgatcatggttcagtacagtcttcacctcccaggctcaagtgaccctcctgcctcagcctctcaagtggctgggacagcagttgcatgctaccaggcctggctttttttttttttttttttttttttttttttcggtagagactgggtctctctgtattgcccaggctagtctcgaactcctgggctcaagtgatcctctggcctcagcctcccaaagtgttggaattacaggcatgagacactgcacccagccagtatagtcttttaacagctttattgaggtacggctaacattgaaaaaactacacaaatgtaaagtatgcaatttgataattttgacaaatgtacacaccagtgaaactatcactacagtcaaaataatgaacatatccatcactcccaatttcctcacgccccttggtaacccctctctcccaactccctgccccctaacatcagacaactactgatgcattctgtctccataggctcatttacattttctagaattttacataaataaaatgacagagtatatactccttcatgtatggcttctttcagcccaattatgtcaagattcatgcttatggctgtgcgtatccttagcccatctctttgtcttgctgagtaggataccattgcatagacagaccacagcttgctcatccattcactcttgacaacgttgaattgtctctgttttttgcaatgacaaataaggttgctatgtacattcctgtatagacatttgtaaaagcacagcatttcatttctcttgggtaaagacctaaaagtggaaaggctgagtcatatggtaaatatatatgtctaactttttaagaaactgtcaaactgttacccaaagggattgtacaattttacatccccaccagcagtgtatgaaaattcccgtacttccacatcctcaccaatatatggtgtggtcaatctttttaattttggacatgntaatgagtgcaaaatgaggcccagagtgtctgaagttacatttgtatcctttttggcatccaaaacaggtgtcaagcatagaaaaaacacttgttccttgaatggtcagtcatttacaagtggaattcattacaaaccggtagttctactgggttaaactatgccttactgtcaacaggcacatacacatacagacagacaggaaggcacagagacaaggcagagcattgataagaaggtgacctgggctctagctctggcctatcacctagtaaaatattagttaagtagccatgagtaactcacttaacttaccacaggctccattttcttatctgtaaaataggaacattgaaacagctaatccccaaggtttgtggataatcagaattacaaagatcaatgacatttctatgagagaaacatatttccaagtatttgatggagtacatcagacacaaaggaaaggaaactgaatatttttgaggttttttttttttaccaagaaattcacattttgttaaattttcagaactacctcctgaggaaagtgtagctgcacccatttagaatgatagaaaacatcaatctgtctgattccaaagccaagttcttgctacaacgagaaatgaaacaactggatccctacagatgcagagacctgggccccacaaatgtgaattctgttcccctaccgaatagagttacagttccataatacagtactccctcacttttccacagtctcacattccacagtttcagttacccacagtcaactgcaatccaaaaatattaatgaaaaattccaaaaataaacaattcagaagttttaaattgtgctccattctgagtagcgtgataaaatcttgtgccaccatcccacctgtccagcttatcgttagtcattgacatcgtctgctcctgacatccaaccattgacatcatcatgactctatgatccaggatcaccgaagcagatgaccctccttctgacatatcatcaggccaatatcagcctaaacactgcatcactatgcccacatcagtcacctcacttcatctcatcaaggaggcaatggatcacctcacatcatcacaagaagaagagtgggtatagaacaataagataattttggggcaggcatggtggctcacgcttgtaatcccaatactttgggaggccaaggcaggaggatcccttgggcccaggcattcaaaaccagcctgggaaacatagtgagacctcctctctctgcaaaaaaaaataaacaaaattatccagatacagtggtgcatgcctgtggtcccagctactcaggaggctaaagtgggaggatcacttggtcccaggaggtcgaggcagcagtaagctgtgatcgtgccactgcactccagcctgggcaataaagtgagaccctgtctcaaaaaaaaaaggtaattttgagaaagagaccacattcatacaacttttattatagtatattgttagaattgttctatttcattacttattgttgttaatttctttctttgcctaatttttttttttttttttgagtcggagtttcactcttgttgcccaggctgtagtgcaatgagacgatctcagctcaccgcaaatcccgcctcccgggttcaagtgattctcctgcctcagcctcccgagtagctgggattacaggcgcctgccaccatgcccagctaattttgtatttttagtagaggcggggtttctccatgttggtcaggctggtctcgaactcctgacctcaggtgaggcctcagcctcctaaagtgctgggattacaggcttgagccactgcgcctggcctctttgcctaatttataaattaaacattgtcacaggcatgtattaatttataggaaaatcatagacatatagagttgggtactatccacagtttcaggcattcactgaggggcttggaacacgccctcctcagatgaggggggactactgtcatctcctcaatcattcttgattcaatcctcaacacaaatggtttggccaggtcttgcctctggagacaaaattgctaaggatttagaggggaaaaaatgtagttcactgggaaagtcacctctgctccactggacagcaacttaaaacccaggccatgacaagtagaaaggccacccccactctccttcacacctggagtattcaggagtcaatcatatttcaggaccaccaggagcaaactgggaaaaactgagctgccttgaggaaagcaatcagctccacaaggggcttaagaaacaagctctgggaggagtggttggagaagagttggggacacatcagaaatgccatcaaatttctaagggctacctcgtggtgtcagacctgtgcatcttcaaggacataaacagatgggataagcagatgagattcacagaggacatcaaaatattggctccccagaagggagaacattctagtaacagagctgcccagctgcagagtggactgtttcacaaagcaacaggtgccctgcctcttgaatcaccatcttcacaggaatgcagtagaagggacttaactcctgccctgaagaaaaggttaggctagggaaacagctccaaaattttttaaaaggaagcaacataggcatctactgggagttttctaaagcctttgtttaatgaaactaaagagctgggacaggaaatgccaaattaaattaatagagccttgctttaagacaatgcaagtggatggtaatgaaggaatgagtcttaggccttggatcaaccgtattaagcaatgctgagcatggagccaattctgttcactagatttgctcagaaagggccagacgagaaggatttttctaaaggcacctactaccaaaaagctgccaaggcgtccaatggagcccagagagaatatgctaacaataaaaagttgaacaccctcaataaaaaagggtaaaagtaattaatagaaaattactgaaagcttttttgaaaccaaaagtagtcagcattggtaaaagtctacaaaagtggacactttcatataatgttggcaggagggtaaaaagacataacctttttggaggacaatttggcaacagagtaccaaaaaccttacaattgaagagaactttggcctgagtgcagtggctcacacctgtaatgccaacactttggaaggccaaggtgggaggattgcttgagcccaaaagtttgagaccagcctggggtaacacagtaagacctcgtctctatgaaaaataagaaaagttagctgggcatggtggcatgtgcctgtggtcccaactacttgagagactgaggcaggaggatcgcttgagcctcggaggtcaaggctgctgtgagccatgttcatgcgactgttctccagtctgggtgacagaatgagaccctgtctcaccagaaaaacaaggcaagagagagagagagagagaaggagagaaagaaaagaaagaaagaaagaaagaaagatggaaggaaggaaagagaagaaagaaagaagaaagaaagaaagaaagaaagaaagaaagaaagaaagaaagaaagaaagagaaagaaagagaaagaaagggagagaaagaaggaaggaaggaaagaaagaaagcaagcaagcaggaaaggaaggaaggaaggaaggaaggaaggaagaaagaaaaagaaagaaagaaagaaagaaagaaagaaagaaagaaagaaagaaagagaaagaaagaaaaagggagagggaaagggaaaagaaaaggacaaagaaaagacctttgaaccctgaatttcacttttagagattcatcttaaggaaattcattccaatagaaatttatccccaggattatctaaatatttgcttttattttcttctagtaattttatggtttaactttctcatgtttaagcctttaatttatttggaatttattttggtatgagaaagtgtgacctttttttgttttactttaaaaaaaatgtattacgattattattttagagacagggtcttgctctgtcacccaggctagagtgcagtggtgtgatcatagctcactgcagccttgaactcctggcctcaagcaattctccctcttcaacttaggagtagctgggaccacaggcatgtaccaccatgcccaactaattttttttattttttgtagagacagagtcttgcttgttgcccagtcttgcaatgttgtctcaaactcctgggctcaagtgatcctgtcgccccagcctcccaaagcactgggattacacgtgtgagccactgcgcccagctgcctttttattttttaatttttcagatgctttgttggttccaaaatagcacttattaacccacgctttccccctctggttttaaatactgcaagtttggctttgaaatacaacccactgccttattcaggctacattcaaggaaatctgagaccaagagtctgaaggcccagtttccttcctcaaacccaggaggtggtaaatgtgtcacttccacactttctatctatttctaagaactccttctttccaaactctgacatgcccctggctcaggtctatagaaattcccagggtccacagacaaagcagaactcacttatggggaaatctgggaaatacttatctgttaaacctgccccatatggtgactcagattgtctaaagcccaaagcatcattttccaccccaaaccatttcctcctccagacttctctatttctgtggtccagagtcaagatcttgatattaccctagagtcccccttctgctctcctgcatacccagatgcccctccctccccagatccattctcccaccctccctcccatcagtttggtgggcccatcaccgcttcccctggcccaggctctccttttgtgcgcttggagcagcagactgatctcccagccttcactcacttcatgtggtaatctgttgtgttcatcactgtcagaatcttctgcatcccctcactactctgctgaaaacactctagtggttcctcattgctcattaatgaaagtctagatattaaacgtagaaggcccagcacaatttgcccctatgccacctacctctctaatcttttctccttactctgacagactctccgtctgtcatttatgtattcttttattgctctcttctacttttagtatgaactggatttatggatttttttaacattgctttcaagtatggaataaagaattttatttatttatttatttatttatttgagactgggtctcactctgttgcccaggccagaatgcaatggtgcagtcatatctcactgtaacctcgaattcctaggctcaagccatcctcctgcctcagcctcctaagtagctatgactacgggtgtgcatcaccacatctggctaatggaataaaatattacaatgcctaatcttaattttcaaaattttaaattacattgtacctaatgcccatgcatttacttttttcagtgggtcaatagccctcactttggcaaaggtcccaggcccaaggtaaggccttactttttccaaactcatcttttgaaagacataagtgcctgtaagttgtaccacattaggttctaggaatttttcatcaaagactttatcagactattttcctctaagttgagaaagagctgggggcagaatatggcactgaatgactgaagagaaggcactgaaatcaggccagaggttgctggaaagagcaatgaggaacaccagcagcaatgaggagccggtgatgattttggcttcacagggaggtgtgtaccacaccgattttatctctacgtggatgaaccacagctgtcggctcccttgtctccaggacatcacactctccacattccctcccatcttccggcttctgcttcccggggccctcatctgccccatcctgggtgaacactggtcggtcaactgctgggcgtaccttcccgctctgcacaccctccctggccaccccacccactctcacggctcgcactgcagaggagccgcatctctagctccagcccatctgcctcttctgagctctaacttcatgtaggcgactcctgccggtgttgcctcacaggcccatcatacttcaaagcattttcccctcagaacaccatgtcctggctgctccctccagaagatacatctctcaagcacatccccgcggctctcacctggatgactgcattcaccttctcccacatttgccctcctttggatgtatatagattgttttaaaatacaaatctgatgtgcttgctctcctgcttgaaacacctcaaaactgccttcaggataaaccactgcccttgacatgttcacaggttgcccatggcctggccctgcccatctcttcagcctcatctcatgccccttgcccctcgctctctgggcttctgcctccctagccctcctttaggttctctaacacaccatagtccttctagtgttggggcctctgcaagtgctgttcccattgcctgagacatgaatccctctccctatctctacctgcaccttcatctgattaatccctacccttcctactcatgatgttgctttctcagggactctctctgactttttaaactaatcagggtctccccagtatatatcttcatagcactctgtattactcctttcttaatgaccacctgctgtagactgaatgtttgtcttcctccaaaattcatatgttaaaacctagccccaaatgtgataatatttggaggaaggctctttgggaggcagagccctcatgaatgggattagtagccttataaaagagacccctgagggctcccttgtcccctccaccgtgtaaggatgcaacaagaaagtatggtctatgatccaaaaagcagacccttgccaggtacccaatatgctggcacttgaacttcccagcctccagaactgtgagaaataaatttctatttttcataagccaccgagtctatggtattttgttataggagcacaaacagactgatgtgccacccaaccatgattatacgtgtaatttatggtttctctgctagtagggatgcaccatggggttaggaaccacgcttttcttatttcccacacagtccttagctctaagcatgttcctgaatcaaagatccccatcttttatgaatgaaggagtcagtgaatgaattaatgaaagaactgataaccctcaataattattccagccttttatacctactattaacaagcttgcattctactccaaatttattgggctttaactctatttttggccagccacatttgacattccctgaagtaaatctatgctttccatcctaagtcaaggaaggacctggactagtagggccaagaaaggtctaaattccatgggtgggagagagagactaaatctgaaaggaagaatagattgagcaaaggtgtagagattggggaaggctggacatttggagagaaggaaaaggaaactgacactaaaccaaacagtctcacaaacacaatctcatccttccaaaactctgtgaagtaagaattactatcccagggccaggcacagtggcccatgcctgtaatcccagcactttgggaggccaaggtgggtggatcacctgaagtcaggagttcaagaccaacctgatcaacatggtgaaaccccatctctactaaaaatacaaaattagctgggcatggtggtgcacacctgtaatcccagctacttgggaggctgaggcaggagaatcatttgaacctgggaggtggaggttgcagtgagcagagatcgtgccactgcactccagcctgggtgacagggagactccgtctcaaaaaaaaaaaaacaaaaaaaaaaccaaaaaaaaaacaaaaaacaagaattactatcccagttttgcagatgaggcaatggaagctctaaaaagttaagtaggagaaacaaacatgaaatgtatgtcttatgcttttcctcatcctatttcctcagcctggaatgtccattctccctccactatgcaaatctaactcttcaagctaacacatagcaatgtctgagaaaccgtccctgtgttcactctgttagcctcacttgctccctccccatccctctgtttcctttctgttataacacttctctattctgctggcatcacagtcatctccacctgccttcctcacaagttaaaagcttgttaagggcaagtggtgttctttgccacctcattccccagggcttctaacacagtgcctcatgcatgacagagttgtaaaacaggttaccaagctggcttcaggcaggtttgcatggaactgtgctttacaggaatacctgctccccccaggccctgggtcttcctcctgagtccaggctcagactctctcatcctgctcgttctctcttggggagccacagtaactttgagcaactttgcatgggatagaatggcctattaggggcagcacaaagaccccatggagggaagagtacagaaagggaaaacgataatcatatttttttaagatgtgcattttcttaacaaaatgctctagtacttgtccagactttcaaactcaaaaacctaagcgtccttttcttgaagatcatcaaaggccccagtggtccttcaggtatgtcaagctttctagaaaataaaggtaagtcataatcacttaacacacatggctaaatggccatttccttctaatttatcagcaactgttacatatttctatactagaaaaaatttatatttatactcagggtggtaagttaaatttgccatcgaagtaaagcagaaagagcgtagcatgtatgtatatgtaactcaactgtgcatgagacaaagatgtcttgaggagaatgagtctaagatgcgcctgagcaatagtaccc

SEQ ID NO: 87 - DNA, 176373 bp, Homo Sapiens
  misc_feature (1)..(176373): n = A,T,C or G
gcacccatgtttctaaagggcataccagccataataacaggatgggtgaggatatagacagcagatgacagagaggagagtgaaagctgggaatcccagctaaaggcatcaggtttatggaatgagtaggggacaatactgtgtgtgtttatacacacatgtatatgtgtgtatatgtatacatgtttatgtatatatataattatatggtaccatttctaattgacaaaataatctatcacattttacattatcagattttacatctattgttctaaatacactcagtcatcagccctgtgtgtgggctcttacccatccccatgcacacctcagctcaaccactgatggatggatcatctgcctatcagaggtggcatattcaggtgaatccatggccacagctgcagcacttcctacccacgcagaaaggctccacaagaggaggcacacccgctctgactgtccctaagctcctgacatcttcaccccatgaaactgctgctcctgggtgcttcctgccttgccctgcccacccttgtactgttctcaccattgacacagctggtgcccgatgcacnaaaacgaatcgtcactattgaagcctgtctctcancggatcgtgactaagaaccccctccttgcttcaagttgtcctgcctttctaggcagagccaccctacatcttaaatatattgattgatgacttacgtctccctaaaatatataaaaccaagctgtgctcttaccaacttgggcacatgtggtcaagacctcctgatgctcttgtcatgagtgggtgggtgttctcaaccttggaaaaataaactttctaaattaactgagacctgggtcagatttttggggttcacagcaacaatttaaaaaactcaccattgacctgaaattttgaccttatgctgttcctcacactcctccatgaaaatagacgccatcctatgagttccctcagccatgtcatgccacacttccaacatgtgtccccatccaccatctgtcttcttattgctgcatcctacccaggccctgatctctggacccattgttgtataattaagaatttggggctgggcatcgtggctgtggctcactcctgtgatctcaacattttgggaaggtgtattagtcaggattcctccgaaggatgcaaccctagggatcctctctatgaccctatgtctacgcgctcaaccgaccgatttgcgcgaacctgcccatgcccgaggacagtgtaatcctaaaacgtcccctgaatcataaggatatgagtgcgaaagtacggttccctctgtcaccactttctaacaacgctatgtccgatccgtgcactaaccccgcccaagtcactgaaacactgatgggcgcttcctctacaggtatccagggccaataccactactcccctcctccctgtcccccttccactctctagaggccgcggatgccatcctctattagcacaaccgaaaacgacggtgaaagtaccacgaagctcacgatctgatcggtcgcccaatgcggttacaacggctgtcatcccaacccccgtcccatcctccatattgcccccccctatgaggatggccctatcatcatgacctccaaaattctgtcatctcccgacgtaatgccgcccctcgaacgcctgacaccatcaagtcngtcacctcccaaaatactcctcctaatcaccaggccgagtatccccggttccacaatacctccttgagacgggccgatatcacacacnggagtttaggtcaactagtaacaagtgggatttgcgactcaggtctatctaatcctcaaacccacgtcctggacccctacacagactgccctccctcagtcctctgtgtggcctcaagaagggtctggacattcaagtttaaaaatccatccaaagaatctatggacccagtggtctctggagtcaatgttctgaggctcagaagggccaggcaggagggagccgcctctacacagtcctgagcagagtgggctgtgtcccggcacagcaggggagatcataaacagaattctgccctgggccctatttaagtaggacctttaggctgccggtgtcatgaccacaggtcccangtctgcacgattggctgtgtgtggaaaatcttcactccttgcggccttgtccttggcagagagcaccgctgcttcctctgatggccaccagggggaggcgctcccctgggaacggtttgaangggagcctcaccccacacgtgccttccgtggtacccagcaccagctgctacccatggttacccacaggcccagctctgctctgaagaaggaggagtggtggcgatcangccttgtctgcatcccgtggctgcccctttcttttctttgggagctaaccgctcactgggattacaggtacgcaccaccacgcctggctaattttgtatttttagtagagacggggtttctccgtgttggtaaggctggtctcgaactcccaacctcagttgatctgcccgcctcagcctcccaaagtgctgggataacaggtgtgagctaccatgcctgggcttatatgtttctagtccaaacatttagctaccttttttttttttttgagacgaagtctcactctgttgcccaagctggagcacagtggcacaatcgtggctcgctgcagcctcaacctcctcaggctcaggtgattctcccacctcggcctccctagtagctgggactacaggtacgcaccactacaccctgctaatttttttgtttttgtattttttgtacagatggggtttcttcatgttacccangctggtcttgaactcctgggctcaagcaatctgcctacttcagcctcccaaagtgctaggattacaagcataagccaccatacccggcctacctacttttaacttgtggaattttctataaggtcanggatgcctgngggaacaaaagtttctcccttggtatatgcaagtaaaatccacatgctgcctcccaggactgtagctgttgtctagtcaccaggctggactgcttggcatgatctcagctcactacaacctccacctcctgggttcaagggattctcctgcttcagccttccaagtagctgggattacaggcatgcactaccatgcccggctaattttgtattcttagtagagacggggtttcgccatgttggccaggctgctctcaaactcctgccctcaagtgatctgcctgcctcggcctcccaaagtgctgggattacaggcgtgagcccccggcccacatgtaaaagtttatatctctgttgtttcaccttgtttttgacctagtctttcagtgatttgaatcttgattcagtcttttgttattttagtggtacttcccagctttgtgtcatctgtggatgacatatgagtcttgcttcttcatgccaatttaagaagactgaacgggaataggtcaaaggcatggccatgagcgatttctctccagcttttcatggtgttcagcttcaaatctattcacatattggacctgcaagccatcatcttatccacaggctatcatcataggtgaatgtaaattgggtttaggtggccaagctgaacgtgagatatnttcagcatgttctctaaaggcctatcaaagctgacatcaaagggataagttccagttacccagctgaagggaaggagggtgtttcagatagaggaaggataagcatgacctattcaaggccagtgaaagaagcgtgcaacggccaagtcaggagaacctgaaattgtgtcaaagagcttggatgcaaagagccgtgggagactattgggggttttaagcagggatataatattcattcaagcatgcagtaaaaggtcactggcacctgccatgggccaggactcgggctctacatgattgcgtctgttttggaaatatcaccctggctgtgagatgaagaacaggtaggagggtcacaaaacttgaagcagagagactgttgaggaagtaagctgtttttgtgtggactgtggcaatcacagaggcagaggatataaatgcacagagacacaaggcatgtgggaggcagaaggaatcaaatacaatgagtgatcagatgtggggttagaatggtgagtganaaagacatactcaaggtgacacgcccaggtatctgggtggatggtaagacattcatggactagaatcgaagaggaggtggggatggacattccttccgtttagaggggttcaccaggaggatttgccggaacatggagaggattaaccaggaatccggtgcctttttccaaactgggttggaggggggtgaatgctttggcacgctgtgtagattttaggtgacgggtggtgacaatgagtccgtgtcgagcgctgattttttcggcctttagagcgagatttatacaatagaatttggcatgagattggattgcttttagtcagcctcttatagcctaaagtctttgagtgactagatgacatatcatgtaagttgctgataggtttccagttttccgctcctaggtctgcatattgtacttttcctcttactcgacttaaccagtaccaacccagcttctcaacggatttataccatggcactttaaagccagcatcactgacaatgagcggtgtggtgttactcggtagaatgctcgcaaggtcggctaaaattggtcatgagctttctttgaacattgctctgaaaacgggaacgctttctcataaagagtaacagaacgaccgtgtagtgcgaatgaagctcgccataccataagtcgtttttgctcccgaatatcagaccagtcaacaagtgtcaatgggctcgtattgcccgaacagattaagctagcatgccaacgggataaacgagtcgctcttggtggagggggggtggggcgcctggtgtttctaaagaggatctcctgccagaaatggtgtgctgacactgttgtcctccttggtgtggaactttggtgggaagaaaggttggaaagggaaattttgatccttggatttaacccgagtttgttactgatgctcacaagactaggggaaggataaaggcaggtgagtcactctaggatggctcantgagctccacagagctggaaccacaggcaccaggagggattcagagcaggcctcagtgcacgtcagctgagtgaaccaatgagcaggtgatgggtccaggcagagccctgtcctctttaggcaaaaacccttgaaacaccgttcccatcctagcctgtgttccacccaaagctggccagtctccaggccctgcctgagccccaaggaagtggtatggtgaaacagaagggccattcctgtccaatgtgtgaggaacttcatttcagacttgttggaagccctgatgttcaaaaacctcaatgatatcattcattttccccatccattcaatgcccatccaatgcccatccgttcaatgccccttccattcctcttcagggaaatgaaaattgttcagaaatcctttctctttcgagaaaccaaccaaaccaaaaccgcgaaattcactaaactagccaagacacaatcctgggttattttccttttcccaaacctcctctgtttaaattaattctaccctggttctcggcccttactgcgaaggtgaactcacctaacctctcccaaacagagaagaaacttctcttggtaaaatgggttttaacacttctaaaaaacccccgctatggttctaaaggtaatggactatggcgtacacaacgtctcgctcatcgtctgccaggaggctaaggtatccacggacaatcgctgagcaacagtgtcgttgatccatctctgtacgcacttgtcaacatggcaggagtacgggagctgcgagaatcctctctgctgatgtcccacggagcatgccgtgagacaacgccacgaacggccctcggagananctactctgcaatgaagacgtacgatacacacgtaggagtcctagctcaccagccgtatctaggtatactgtactcgcggatactcactcgtgcatgcggcaatagatcgatacgcagtcgtcacgcccatgctctcagtgtgtgaccttctggcggtagcgtngtgggcgctattactgtgcgcagcaggcgcntcgtacatgtgtcgggtagcgatgccaggagctgtaacatagcaagtcgcccccctactcctatcactatccctacgctggaccgcactcgagatctgaacgcacgtcttaacctgccagtactcgtgagacctatactgcgcaagccttggctaggagatcctgcagcgccggcaaagaatcagctatgatccccttgcgattatcgcacacgcaccatagagtatgtgcatattaacctctgaatgtgctgcaagcagacggttgctcaacatatatatggatgtggggaaatcgccctggtcaccgccacttggcgtcaggaggcaccagcacgtctgagtgtcacgcacgttactcggccgaatggtgaattcatccgtcgtctcgagggggtgaaagacggggagttatgctgtaatggcaccgctcaccctgggcttatgagcagacctaaccctcccanagtgctgggattacaggcatgagccaccgtgcccggcccagtatctgaacttctgtggccaggcagaaaaggtcctgtgttactcgtctcctttatcattcatgtccatattctcccatttgctaacatttatgtttctgctccactggattctttggatttttctagaacatacccatgctttgcattgccttggtctttgaatatttggtccacttttcctgcaaagtcccctctcaccttatcttcctggtaaacttccagccaacacctctttactaaccagagaaacatggttcaactgtgcacaggcttgcacagaaactgttctcatattgtcttgtcattgtcaatgtggcagagatgcaccttagatacctctttgagaaaggactcactgcccagctgcctggcacgtgatgagctgatagctccagctatagactcctttagggtcaacctctgctttccagttgagatcatatcctttgcagggtggcctccccagtgatgactaaggcagtgttacaatggcctagtcatttcctcccaatgctggactcccaatgaaccatctgctccggagcttcccactgggcagtcagagaccttagctagtctgcctccgaatcagaaggctctctcttgccactctggccgctgtgtctaaagattcacggctgtagttccaactcccgccgccctctactgtgtcctcttaatggcagtcattcaccatcttcctgtccctccccttcatttcttggatggtgactgtcactttgctgcaacagaaccctgtcccaatccttgatggttcaatacacacatagacattctttttaacagggcggcctctcaggtctttaattttcttccctccaataaccttgtgatgatcccccagcttagccacttactgccagatcattaccagtaactccagcccctccttaattctagtttctaatatcctaatctgtgacctcacattccaacttcttcattcttatcccctgagtcaaaaaatcctttgatccatgcaatccattaagtcatctaccttttcaccattcttcgccccactagggttctcattcctttattacccatatgaaattccaaggcctgttggaatcactcccttgcagccactgtcaatacttctgccccttttacttcatcacccttatgtggcaaaaccacagccctggtggagtcgatccttacccctgctctgtgccaacagccgcacacgcatggctgatggaggttggaaaaatccacacatgcagtgggccctgtatgtccatatacgtatccaacctccagccttgcatatgcctcagtgctgcctgacaacacattatatgttttccttagttccttcagtctcctgggtgcctaggtgagtatctcagacatccttctctctctgcaaagctccaacacctccacgtcacattcaactgatgactgtgtctcctatgtcacttagatcacagaggcatacataaacaaatcccagccactgccagcactctgcacatctgcgagcatggcacccccaatctaggcctttcctgctgtcacttggggtgagctgattatactcgatcctagtcatttctacttatgcaccttaaggcctccctctaacattttaatttaagattgaaaaagcaaagattattctgttttggctgcgcctatagtaaagtaacccctatgncaaattttgacaccttatagtatttgacagggataagtataaaattgcttgattgatacatccacacccaaatgtatgctgggaatgattttgtttcacggcactcattacttaatttttaaaactcttatttaaatttgcaatgttttaaatgaccatcacttaaagtagtaatcaacagaggttaggagaacataacaatactctttctcttagaaaatacaacagaaatataattttttacagttttgctcccaaacttttctctgtaataacatgccttactcacctttacaataggtttgttgtgagaatcttgtaatgtaaaccctgggtgttctgtgaagcatttttaaacttctagtttacactgactcttattcaagtgtttttaaaaatatatttaaaaaactggccaggtgcagtggctcacacctgtaatcccagcactttgggaggccaaggcgggcagatcacaaggtcaggagtttgagaccagcctagccaacatagtaaaacctcgtctctactaaaaatacaaaaattagctgggcgtggtggcgggcgcctgtagtcccagctactcaggaggctgaggcagaagaatcgcttgaacccgggaggcagaggttgtggtgaaccaagtttgcgccaatgcactgccagcctctgcagngacagccgggggcgggccgagtgatcctaaagcccgctcgcttcacaacaaagcctaacagtccaatcacttaatgctgcatttattcctggggaagcaagtctcctttgcactttacacagtgagataatcagtttctcatgtggaccactgggccaggagggcctgacaaagggcagtctacatttcagactggaaactgctcccagaactatttctttctagttcccacctcggtctgaggtgcctgaggagagggactcaacagaggaagcaggagcatagctcaaagtctcagaacatggaagaggaaaagaatcctcacaagattacgtaacttacaggcgtgttgctgcttcagtagaagtttcatctccctcaatcctgtacacttttccatacattacatactcaaactggtcagccctatggagcaatagcagcaaagttattcttaacagtaattaacaatataaaagatcccatttaaaaatggttactggtcagccgggcgtggtnnntcnancctntaaccccancactttggaaagcatgcgggcgatcccaagtctgatatcgaaacatctgcctaacatgtgcaacccctctctacaaaatacaaaaaatatccgggcttgtgttggcgccgttatctcactacccggagctaagtaagaaatgctttacctggaagcgatttttttacttatatcccctctcttcaccgggcgcgaccaaattctttagtataggaaagtttattgttttatgcctttgtcaaggctctactgtatcttttctgtccactcacggttctgaacaacagcaggcgattcctagccctgtacccggggcattgtccaacactcgacagggctgaattcgtccataacggtgtgcccctctgggatataggatgaaatgaattgatctgagtacctgggatgtaaagttactaaaacgccagctaggttcacgccccgatgcttaaatatgatcgtggcctacacctcgtccagcagaaaaagtaccctttcttcaacaccacctcacgatcctccaatttaggagctataaaactcatgactctttatttaccccctgcagattctcaatccaatagtgtgtgtctccctgtgaactcacggatataccgattttccccacgtcatttccacacgtcgcaatcgcttagtcatccctatgtatgagaatcatggatgactatgttgaagtccatctataaagttcaacccccatctccgtccctgattccccctccccaagatcaccaacgcgactcgacatattgttatcgcccaagggacctcttgcatcccccatatccactggtcacctcccctcttggctggaagtcaccgggaagttctccacatgttgttgcgagcgatgttcctaaactttagcgccattgactcgagcatggtcatggctgtttcctgagggtgttcctaaaggatactacgttccctaaagtccagagaaaaaaaaaaaagtaacataatgtggcttatttggtataaaaattttacaggaagcattgtcaaatatgaaatagtgtttggttttgtttgggctgtatttgtataaatatgttattggtatgtgttccaaaattataggaaactcctataattctgatatgacttggtgtacattatcagtaataattataattgttatggtaaattattgtgtgccatggaggtaacaaatttcctcatcaagtgtgtctttgactatggttgccctaaaactttttgccattcacagacaattgtcttgctttggtcctctttagaaggtggttttataatcagctataaaactctaacgggtgctcttgaatgcaggcttaagatagctttggagactgtgacatcagaatagaggaaaaactttcagtattcatggagtgctgaaatattcatgaatatcaagcaaaacaggaattaacttcatagatggaactaaaagaatgctgaagtaatctttttgactttttttcttaaaatgttgatccttcgttttgtttttcagagtcaaggaaatttttctgttgagatattgacagcttttaacaattaagtatactccagtgaacacaatttggagcatatttgtgtctctctatatatatttggaaacaatntttgagtattcttaacttattgcaatattggttgtctgctataccagtaatgggattgctgggtcaaatggtatttctggttccagatccttgaggaattgccacactgtcttccacaatggttgaactaactgacactcccaccaacagtgtaaaagcattcctatttctccacatcctctccagcatctgttgtttcctgactttttaataatcgccattctaactggcatgagatggtatctcattgtggtttcaatttgcatttctctaatgaccagtgatgatgagctttttttcatgtttgttggccacataaatgtcttcttctgagatgtgtctgttcatatcttttgcccactttttgatgggtttttttttcttgcaaatttgtttaaattccttgtagattctggatattagccctttgtcagatggatagattgaaaaaattttctcctattctgtaggttgcctgttcactctgacaatagtttcttttgctgtgcagaagcttttcagtttaattagatcccatttgtcaattggcttttgttgcaattgcttttggtgttctaatcatgaagtctttgctcatgcctatgtcctgaatggtattgcctaggttttcttctatggtttttatggttttaggtcttatgtttaaatccttcttttttttttttttttttttttgagatggagtcttagtctgttgcccaggctggagagcgagtggcgtgtctntaggacgcgcatgttgtctaaaggtttgtcttcctccaaaattcatatgttaaaacctagccccaaatgtgataatatttggaggaaggctctttgggaggcagagccctcatgaatgggattagtagccttataaaagagacccctgagggctcccttgtcccctccaccgtgtaaggatgcaacaagaaagtatggtctatgatccaaaaagcagacccttgccaggtacccaatatgctggcacttgaacttcccagcctccagaactgtgagaaataaatttctatttttcataagccaccgagtctatggtattttgttataggagcacaaacagactgatgtgccacccaaccatgattatacgtgtaatttatggtttctctgctagtagggatgcaccatggggttaggaaccacgcttttcttatttcccacacagtccttagctctaagcatgttcctgaatcaaagatccccatcttttatgaatgaaggagtcagtgaatgaattaatgaaagaactgataaccctcaataattattccagccttttatacctactattaaacggttctctaaagactttcaagagctggattttatgctttaggtgaaggtgataaagtaaagtgctttcactgtggaggggggctaactgattggaagcccagcgaagacccttgggaacaacatgataaatggcatccagggtgtaaatatctgttagaacagaagacacgaaaatatataaacaatattcatttatcccattcacttgaggagtgtctggtaagaactgctgaaaaaacgccatcactaactagaaaaattgataccatcttccataatcctatggtacaagaagctatatgaatggggttcagtttcaaagacattaagaaaataatggaggaaaaaattcagacatctgggagcaactgtaaatcacttgaggttctgattgcagatccagtgaaggctcagaaagacagtacacaagacgaatcaagtcagacttcattgcagaaagagattagtactgaagagcagctaagacacctgcaagaggagaagctttgcaaaatctgtatggatagaaatattgctgtcgtttttattccttgtggacatccagtcactcgtaaacaatgtgctgaagtggttgacaaatgtctcaagtggtacgcagtcattactttcaagcaaaaaaattttatgtcttaatctaacgctatagtaggcatattatgttcgtattatcctgattgaatgtgtgatgtgaactgactttaagtaatcaggattgaattccattagcatttggtaccaagtaggaaaaaaaaatgtaaagccagtgcttagacacagccgctgtcttaagaactgggctaggagtgagcagtgagccaagatcgcaccattgcacttcagcctgggcaacaagagcaaaactccatctcaaaaaaatacatatatatatatgacccataaaaaggagataaatcaacacttcagaactgacccaaacttgcaaagatactataattaacagaaaaggacagtttactaagtactccgtatgttcaacaagtgaaagattaaacatattaagtagagatgtagaagatataagaagatccaaaatgaacttttagagttgaaaactacaatatttaagataaaaatacactaggtgggattaaaagtagattacacattgcataagataaaaaaaaatgagcctgaatacagcacagtataaactatcttaaacaaaaacacagagagaaaaaataactttagagacttagctcttatcctctatttgtttctaaacagaggataaggggcagaaaaaatgtttgaagaaatcatgatttttaaatttccaactgagataggaatagcactgggtagtcacaggaggctggaaagacccaaacagcagttaaaacaggaactaggcaaagaaaccaaaggataacagtaaacctaaactaagggagagaaaactgacaaaagctgacttaggataactgaccctgaatataagccgcaagtaaccaattaaatttgttttccaaaattgtattaacaatctatgaaatttttatcttgaccatagctataacttccagaagccttttataacctctataacctttattaaggagtaggttaatgcttcaagaaaaccttgttaatctgacacaggacccatatgctgatcttgcatcagtgtggcttggacatcaatgattatgattaatttatagagaaattgaacttattttatctctcaaaattggcccttacaatctcacacacccacctcttccactatagttcctgggccttgagttgaatagctttaatttctggctctgtgtttcaagaatgcagtttattttgattggcattttctaccagtcctgaagatgaacctttaattgctgtcagtatttaagatttagcaggacttgtccttttaagaaccaggagtcaagccctataactcaatgtcacaaggactttaaaagcacatacataaagatatatggatgtaataatcataatttttaaaaaattgtattaatctcagtgttttctaagcaaaccaaaacttaataataatggcatagaaattatttcaataaaacataaaatctgttaagccagttaccaaaaggcaaaagaaaagaccttctgcaatgcacagaatattatgttggaagaaaacatttcctttagacctttaagaaaacattgttagcatcaggacacaacaaacagaatctgagggtaaaaaacgtatatgagctgaagggagttgaaggagggcattactatttcccacccttttaaaggggagagaaaacctaaaacagcaagatgcaataaaagctgaactttgggttaaaaaaaaattcttaagtctcttataatttattaagagtgaatcaaccccgtaagaaaatttcattgttctaaccaattttttaatatataagtagttttttaacatcaacccaatctctagaaagaccattataatttccctttaattatagacaactttatcatataaaagtttttttaaataaatcctcttattgtgacttacacagactattcatgacatgcttggactttctggtttgtcgtgaacatccttttctttctttctttcttttttaaattttactttacgttctgggatacatgtgaagaacatggaggtttattacgtaggtgtacatgtgccatggtggtttgctgcacccattaacccgtcatctatattaggtatttttcctaatgttatccctccccttgccccccacctcctgacaggccctggtgtgggacatcccctccctgtgtccatgtgttctcaatgttcactcccacttatgattgagaactgcagtgtttggttttctgttcgctaaatataagctatgataaaacagttggccctctgtatcatgggtttcacaactgtggattcaactaactgtggatgaaaaatacttgggaaaaaaagaatggctgcatctgtactgcacaagtgcgtgcttttattctcgtcattattccctaagcaatacaatataacaactatttatatagcatttacgctgtattaggtattataagtaatctagagatgatttgaagtatacaggaggatgtgcttaggttacatgcaaatattatgccactttatataaggcccttgagcctcctcagattttggtatccatggcagtcctggagtcaattctcctgcaacatctccatttgttcagattctcttctatatcatgtttatatcagaaaatctacataagattttttaatgtgttcatataggttttgtgtatttttggttgttaatccctagatatatgcagtatttattgctattatgagtagtgtttctttaccatgtattctagttggttattgctgacagagaaatgttgctggtgtttctaagttaccttgtttctaacaaccttgctgaactcttattagttctcatagtttttaattaatctttcttagttctgataacataatctgcaaataatgacaattttatatctttctttccaatgcttatatctctcagtcctctttatcccaaagtattttccaggatctccactataacattaaatagtaataagaatttctgtcttgttactgatcttaaggagaataaatttaaatttcctctgtcaggttttatgcttgatatagatttgtgatatatagcctttcacaggttaaaaaaaaatgctttcctagtagtcctaattttttaaaaaaatcatcataaatagatgttgaacattatcaaatgctttttctgcatctatagagataatcatatggttttttactatttattaatgtaatgaattagaccaattttctaatgccaactctttcttgtatttgtagggtaaatcctatgggatcataaaatacttttaatacattgttagatttgaagagttaacgccttatttagaacgttttcagtcacatccataagtgaaatggcactatagtgtctattactattatatttttctggttctgaaaccaaaattatactcacctcatacagtaagttgggcaacttttgttctttttttctgaaacaatttgtgtatagaagaaattaactgttccttgaaagtttgataataatcatccagaaaattatccccatctagggcttttacaaaaaggagactctagaatgccatttcggtttccttgatgtgtattggcctctttcatttaggcttttggattttttagggcattttttcactataggctttttaccggcataaacttcaggttggatgttcggtcaaagtggtccggcgatgcgaaaacgagagggctcgaggactgggcagagaactatttgaaggtatctctcaggggaaaccaagcggaaggcggggagtaaaattgggagggagcgacggccttcaaagaaggggcttgcattagatcggcgagatccgggagggtctggtggggagaaatgactagaggacaaatctaatggagagacagacggagatagatatcgtgacagagagagggacagtgacagcgcacaacagtgcagggtccatgagtacaaggcccttaagtgtacaccccagccggagtcatggcaattcgattcctgtactgaccacccaggatttgggtagactgtacgagttaatgagcatggtccccaacaagactgcttcgacctcagatgcaaagcacacttcaggggtccccaagccactcatgttttttgaatgactgccataagttcaaaaattcccacaattctctcagattcaataactgggtataaccactcatagaactcaagaaaatgctatcattattattacaattttattataaaggatacaaatcagaaggactagccaaatgaggagacacatagagagaggactagtaaaaaacagagcttctgcgtcctaccttcaaggaatcaggatgcaccaccctcccagcacatcaagtgctcatcaaccaggaagttcctctgagctccaatgtccagagattttagggaggattcattacataggtatcattgattaaatcattggccatgtacttgaactcaatctccagtgtccctcttctccctagaggtctgaagggttggctaatatcatgtggctcaaagccccaactctaattacctttttggtcttttcagggactagaccccatcctgaagctatctacaggccctgccatgagttagctcattaacataacaaagacacttatattactcagaaaattccaacagttttagaagctccatgtcaggaacctgggacatagatcaaattctttttttttttttttttttggagacagggtcttgctgtgttgcccaggctagagtgcaacgacagatcacagctcaatgcagcttcaacttcccaggcttaagtgacctttccaccttaaccttccaagtatctgggaccacagaaaatggctaattatcctggctgatttttaaactttttttttttgtagggatgggatcgccctgtgttgccaaggttggtctcaaactcctgggttcaagcaatcattctgccctggcctctgtgatggttaatactgagtgtcaacttgattggattgaaggatacaaaataatatttttgggtgtgtctgtgaaggtttcgccaaaagacattactttgagtcagtggacggggaaatccccccttccccatgggacggggagacccccctccatccaggtaaaaaaatctaatcacctgcaatgtggcagaaataaaggagggaaaaaacggggacccctanatgggttattctccacctaattcttcccccaggccatgtatttcatttctacagaccctgagatgaatttgtcattgccacggggtcctgaagttcaaatactctatttggtatcctgcccctgtggttaactgtgatcatttcactcaccttgtttatgatgagaggtgccaccatctggcctcctccactctgcaatcctgttaattcctatcaaagctgaaaacctgctgcagcacccacaccatcacctccagcctagagagggaagctaccagtgagctctcctggatgccggtgtgcccctcgccaatacatttcttcttagtcccttggtcatcctgaggtgtgtgattaatggacagctatgtggattgcacataatagatgtactccagcatcttcatccctgattttcctttacagaaatcactcaaccttagcaacatgtgaaaatcacctaaggacattctttaaatccctctgtccacatggcaacacaaaccacttaaataagaatctccagggagtcactcaagcatcaatgttttttaaagctccaattttaaggatcattacattatgtcgaagaaattatagtatttcagccttactgactgtaaaccaccaccatatctaagcatccattagtcaacctagcagacaataaactaacattacctccaggtactcaaatcaattcattgcatcccaaatcccagatgggcccacccttattgacaaattcagcccaatcttggttgaacacatttagaatatatttccatgaacaatatccggttgacgagtttctttaactttttggagtttaagccatttcctttcacagtagccttgttaattccctgtcaatgctccatgggggtcatgaagagacctcttattaactgtgaagcaacttggctcaggtgcagacactcaaatgcttcacatgcagtgggaaaagagagtgattgtctactttaaaaagaactgagtctttattcagtcgattcttctaatctatgaacatagcatctctctcaaagcatttagtccttctttaatttctgtcattaattttttaaaattttcatcctaaagattctgtatatgttttgttgaatttatgcttaagcatttcactttcttggtaacaattataaatgattttgtgttttttattccactagttcattttcagtgtgtagaaaagcaatgaatttttgtgtgttgatctttgttccaacatcttgcaacattattgaactcatttattagttctaggaggttttttcatttttcttgtagataccttgagattttctatatagacagtcatgttgtctgcaaacaggcacagttttatttcttccttttcaatctatatgcctttttttttttttttgccttattgcagtggctagaacttctagcactatgtcaaatagcattggtgaaagcagacatccttgttccttgtcttagaggaacatttggtctttaatcttgatttaaaaaattccttgcactaagttaccgtgttttgcgggagggagaggtggggtgaggtggggatttcccctaatgtttacaagctgggattttctttttcctgtgtctaattattttcctcattggcttgaaaaatctgataaaacattttaggactgtgtataaaatagaattagccaagtgcaatgtctttattcagaagaaatttcatggacgttgtgcctactctcttggcttcctggcttcatggctttccagatcccacagtaagctctggatagtagaagttatagtaagactgacttctaaataaatgaagtgactttaaccttactgatatggcttaaagaaaaggagtggcctttaagatccatgaacttctcaaacaaaagtgataacgttatctccatgcatatataatactaaatataatgcaactgagagaagtaggctgtggtaagaaaggagacccaagtgccatctgaaggcagcacttaccactctgcttcatcccaccgaggaaacaaagcatgagtattgccagattttcttctgtttcaagaaaagccagaaatccaggtttttgcgtgaaatgtcctgattttaatgttgggaactaatttatattttgaaataacattgtgtgggacaagtgaacttgtatgtggaactgctttctcccagtggcgaccagtttggaccgttgatactcagcaagttcagccaagtgcgccttgtcattgtcagtcatcaaggtgatgtgtgattggtcaagcaattaattttgctcagcatctcgtgtgttttcaaaagaactgaaggttcatttgctttcagagcacaatgcgtattcatagtatattgacttaatttctaagtgtaagtgaattaatcatctgaattttttattttcagataggcttaacaaatagaacattctgtatataaatgtgtaaattagagttaatctttccaatcacataattcgttttatgtgaaaaaggaatgaactgttccatgctggtggaaagatagagattatttttagaggtttgtcgttgtgttttgggattctgttttcttttaaaattgtaaatatgtacttgtgtgaatgattttttaaaatgattttaccatttttggaagggtatttaatgatagaatatcatcgagccaacatgcactgacatagaaagatgtcaaagatatattaagtgtaaaatgcaagagggaaaacactatgtacagtctgagccaaatcaaagcatgtatgttttttatatgtgtacaacaaaaggtttggaaagatatgcgccgaattgttaaatgtggtttcacttgagggggtgggaggatggggccccagaggggtttttatgggggcctttcacttggtatttttttcattttgttctgtttgaaattttgttttttctttttaaatggagtttcactcttgtcgcctaggctgcaatgtagtggcgtgaactcagctcactgcaacctccgcctcccaggttcaagtgattctcctgcctcagcctcccatgcctcctgtgtagctgggattacaggcacccatcaccatgcctggctaatttttgtattttcagtagagatggggtttcaccatgttggccaggctggtctgtaattcctgacctcaagtgatccacccaccttggcctcccaaagtgctgggatttcaggtgtgagccaccacgcccagccctgtttaaattttttataagtatgtactacttttgtaatcagaattattagaaagcattttactgatttaaaagcttagacatgttcaaatgcctgcaaaactacttaacactcagctttagtttttctaatccaaaaaggccgggcagttaatctttttggtgccaatgtgaaatttaaacggttttatgtttttcctgtgttgtgaatgaaaaatatttctgagtggtggttttttgacaggtagaccatgtcttgtcttgtttcaaaataagtatttctgattttgtaaaatgaaatatacaatatgtcacagatcttccaattaagtagtaagggtttatccttaatccttgctaatttaagcttgcataagtcactttactaaaagatctttgttaagctagtattttaaacatctgtcagcttatgtaggtaaaagtagaagcatgtttgtacactgttgtagttatagtgacagctttccatgttgaggttctcatatcaccttgtatcttgaagtttcatgtgagtttttaccattaggatgattaagatgtatataggacaaaatattaagtctttcctttacctaagtttgctttcttgactagtaatagtagtagatatttctgtaataaatgttctctcaagatccttaaaatctcttggaaattataaaattattggaaagacaagaacagtttttattcattatatgcattattatcgctttctcaagaaaagggaactggagcaattaaacatatgtaatttttttttaaaaaaccctaaacctaaacatctacctatatacaaaaattaattaacaatggatcatggactccaatgtaaaacatgaaactctaaacttctagaaaaaaaactggagaaaacctttggtacctatgacaaggcacagtttttagacttaacactagaagtgtgaactatacaagaaaaaattaataatttgaaccttatgaaaatcaaattatttgctctccaaaagaccctgttaagaggatgaaaactaaattacagattgagagaaaatatttgtaaatcacatatttgacaatggacttgtatctaaaatatctaaagaactctcaaaactcaacattaaaaaaaatatctaattagaaaatgagtgaacattttacgaaaggggccttatagattagcaaataaaacacttgaaaagatactcagcatcactagccattagaaaaatgcatattaaaaccacaataatgtatcgctacacacatataagaatggtttatgaaaaaatagtgatgacaccaactgttagtgaagatgtggagaaacactcatacattgctggtagaaatgtaaaatggcatagccactgtggaaaattatttggcagttccttttaaaactaaaaatcaatctaccacacaacccagcaatttcattacagggcatatatcccagagaaatgaagatttatgatcacacaaaaatctgtacacaaatgttttatggtcactttattcataatagccaaaacctggaaactatccaaatgtccttcaatgggcaaaggattaaacacactgtgatacatccataccatggaatactactcagcaataataaggaaagaattactgctacacacaagttggattaaactcaaggaaattgtgctgagtgaaaaattaacaagccaatctcaaaggacacatacttcatgattccatttgtataacattaattaacacaattaattacagagatggagaacagaatagtggttgccagggattatacatggtggacgcggtgaggcgggcctccacgccttggagatgaagggggctacaccctttaaagcacacccacgagagagttttgtgcggaggggcccaatttaagtactccgccccggggggggaacacaggggcaaacaaaaaaaattggccttgggggtgaccaaacacacaaaaaaaaaacaaacacacaaaaaaacaacnatgggtgggaggattaatcgccaaatctgagtaagctatctggacagtaccaatatcgatttcccagttttgatgttgtactataataatgcaagatgttaacattggaagaagctggctgaagggggctcaggaactctctggacatttctttgtaccttcctgtgaatccatcattattacaaaataggacattttctaaaggttaaatcattttaattttaaaatgtccctgttactgttgaaactcacatctccatatactgatcaagaacagcactaatggcccctggcctccaggaattcacaattcctactgacttttctttgaaaccttggccaagtcgcttctcttctctggtcctcaatttttcatcttcaaaatgaagattgaatgactattaaaatctcttgcaattcttgagatgaagggtcctaaaggaactgaagaggatgccatgtaatgtaaatatgggtttttactccatcagccagccaagacagagggcagacaccaagacatggtaaccaaggaggccatgtgtaaacaaagaccatttagacttatgctctggcctttgcagcccaactggtgtggccagttggtggggtatgaagaaaatggggccttccaggaaccatgttgagtggagataagcagggaggaatgcagaagacatgggggcagtgccagtctcagcccgagccagctacacccacacatggttatgaaagactgacagcctgtaagntgaacacagccctgcctctcttagataggcgcaaatatgatctcagatgtggatttactgtaaagttcatcaaatttaaatttcagaacacttaatctgcaagagtcctttccaagaccctatacctaattttgtgtttacaattttatatttgttttcttaaagaagaccaccaatataaactatatccagccttcatgataagtacataggaaactatgcaaataagggggaaaaaaaacaaagaaaaatacctagtttactaatggttcacttctgaatagcacatattcataatgatacaagcactcattactagtctaggaaaatgaagatataattgcattaggaagatcaagaggtaggaaatgtggatgtgtgtggtatagactagggcaggacaaagaacctaaatcctcattttctaaagataattgttaatacgtaaaactcaaaattcaagaagtaacagtaaaagcggtcattaagaaacaagcactaaacaccagataggaagcgagagatgggggaagagggcgacaatctgattattttttgcaacaaattttgtaaaaccatttgactgtttacatgtagaacttggatcttttttaaaaaacacaaaataataatactattattttttaactggatttttgaaaaagaagataaaagtctcattttagtaattaaaactcattccaggttagtccactcaaaacttatattcgaaaattaaaactttgggaggctgaggcaggcagatcacctgaggttgggagttcgagaccagcctgaccaacacggagaaaccccgtctctactaaaaatacaaaattagctgggcgttgtgcatgcctgtaatcccagctactcgggaggctgaggcaggagaattgcttgaacccgggaggcagaggttgcagtgagccgagatcacaccattgcactccagcctgggcaacaagagtgaaactccatctcaaaaaaaaaaaaaaaaaaaaattaaaacctctggaagttgagtttgcaaatattcattatgctcatttttaacttgtatgtttggaaaatgtcatgatgaaaattgaggttgggggatgagaaaaaaagaaaaacatcaaccccacagcccattcaattttcagcccgacccacagctccggggaagggcagcaggtccatccttcactctttcttcacctctttcccctccttctggctcttccacctctaatttggagcccaaaaaaaggcactgggaaatggaaaagtcttttgtacgtggtacttgccggggaagctgccatgaaaacctggccccacggtggggagggaatgcccanctgaggcctcgtgcccatgctaggatagactcgtccaaacatgtcaggtggtctgacagggcaagcancangaaatcatgtatgagtatgaactgatctgtatgcaagggcggggagaacacgcggaggaatggggcgtgagaaaacagcacagtacgtttctttagcagctgtctctgctcagccatgggaggtcacagagaaagaggcttggaggcgttattttcactgtgagatgtgagtgtaaaaaagtgcccaagacacagtgagtaccagggagatgccctctttcctacccgaatgcagaatggccacaggccttaaaacacacacatgggtcctcagaggagagaggcctccacagtggacacccgcattctcccctggtcagcagcagcagggcgagtgctgggccatcatgaagcttcacaggcaatgagctctcagcaataacaggaacagtgcctgggggactgtagctgcaagaccgattttcatgtaagatggcctctgaggactccgagatacaccaggctgagactagctggcagctccaagttgttggtcagaagagaacaggaactagggaaattggaattactgttactacaattcctttacatccgcacaaccatgaggtccagcgattttctattatttttttttttaagacagggtctcagtatgtcgcccagcatagagtgcattgatgtgatcatggttcagtacagtattcacgtcccaggctcaagtgaccctcctgcctcagcctctcaagtggctgggacagcagttgcatgctaccaggccaggctttttttttttttttttttagtttctgtagagcacatagcggttaacaatggcacagggaaacaaacagttccaggtgcaggggctctaaatctatcataagatgttaggtatgggggctctgccggacacaaactcaaggctttatgctgttatctcttgagcgaaatcctgggaacttcgtacattgcttgcttcagtaccttatcagttaatcggactctttgatatgttgggagtcagcgtacacaagttaactccttgaggaagggggtgggtaaggagtccttgatgtctggtaaatgaaggagcgaaatcgagttcctctggctttctcagctaagggagagcttattcatgtggaaacaaggctaagtgattaagggagaaagggagagtctgaaaacaaggttaggtattacaatgtcaataaaattggtctccttatacagtcctatggtagatttctttccatctttaatctccctctagcaccaccagactttttctctctgtaccttgagatgtaaattttgctatctgaattttcgtctaagagttgtttcctttaatatgcaaatttagggttatttagctgacaactgccaaagtagtgaaacaagttatcaagaacttgaacgtctaaggtaggaaaaaaaaaagtctttatgaatctataagatgtacttctattggcatgcctaatacgtctatgtatttacgtgttgtgtacacagtttttcactactgaaaatatatagaggagttctaattaattgacttaagacaataaaagcgcttgaatcaaataccttatcaggaaaaaggaaaagacaagtcaaatgcttgttcaagtttatataacttaagtaaaatctttaataaataagctagctttaacattatttgaaatgtcttaagaattgccagcaggttctgggttacagaactagtgggggtgcagtggggtgagggttggtggggtggggggtggtacgggggctttgttttttcttgctgcccccttctgggttggggaagtggcaggaccttggcagcaccccgagccggcatggcgttaataatggagggatgccagacccaagtggctaaggcccggctgcagagccaagttggcatttccagactggggctcgggccgcaccctctccaggaccctccccttgtaccgagcagattgtcgcgggcagtttgggccagctgtcctggcgtggaatttcccaaattcaacaaatcctccaagaaatcaatccatccattcatccatccatccatccatccatccatccatccatccatccgtggcagattatgaagcatggatcattacttttgggatgtggatatattcagttaacaaggagcagctttcaagagctggattttatgctttgggtgaagtttagaaacactagctcccacacctcatgtgctctagcgcctcttacctcatgccctccactctcagtcttgcactcaccctgccacactcaagggcttccccaggttccttcttagattccaccgatagctcagggactttgcacatgctacggtctctgcctggctcctccccagatcttctcatgcctagctgcttctcatcagcacccctcagagactgtccctgccccacctctccaggttccatacctgccaccctcccccaatcacgtaacagtttcttcacagagcgagttaccatcccagtatttccctaacttattttttgtgactggtctgttgcctgtctccaccacaagaacataagctgcatgtgaacaggagccttgtctatcttgtcaccccagtggctgtgacataacctgatacacattagatgctcaatgatgtttgatgaatgaagtgctggtagtccaactgtgtttccttgtctgtgtaagtatgtctgttgtggtttcctaagaacctacagctctcccactgtgactcctgttctatggtcctgatttgctggactagaatcctaacctacatgcttactcttagtgtcctcccccagaggctgaatcccagtccctaaacctccaccaaatggctaagacctagcttccaaccagacaggcctacgctgagacctcagcaccgcccttctgcggtctcatccttaacgcatccttcagggcccagcttaaatgtctcttctccaaggaaggctatcctctttctgcccctcagtgctctccatgcctcctctatgcctccatgcctgctttccaaccctgcagaggtggagaagttgctaatctgctgtgttgacatgtgctggggtgccttgggccagggagcaggctggtggtgtgctgatagcccgtggctgtgcccaggtccatgctcacttcctgagccccagtggagtaggctccctttcccttattgcagcactcagaggaaggacgtgcttcttaggacagatctggccaacctctccctcgtgagagaaggcccagccatcctcttgccctctttctttctcctgcccccgagtaataaaggtgcctggtcagagccttctagaaggagacccaaacatccaccacacattcccagttccaaccgtcatccacatggctggctgtgcaggtaaacgcagagtctgtttcacacacccaaccatctagtattggatgggaggacagtagcgtgacactcttctccagccttgagccctactgtgggccccacccaacccagataccagaggagccctgtactgggatgctattggatgcttgtccagtcatgtacaaagttagccctttgttatatagagttagctacgtacatcttcctctgtagggaacccaagaggggagaagagatatgtagtaggatttaacctgcaaatcctctgctgagcaccgtgcactacatacagtgggtagcatgtggtaggtgctcaataactattgaccgatctattgaatacacgtaagatcgtgacactatctaaaacgnggggtgtgggggaaaaaccccccccttgtttaggaaacccaaattggaccgtgttggcgcgcgattgtgctaaagatcatgcatgcctgatcaaacgtccccatatggcgtctcagagtcaactccttccccatcagtgccctgacttcggcataacaaacctggcaggttaagtgattaatcggtcctgtacaactgtagcccttagcaggaagcactaagcttcgttttcatttatttcttccctggaactgcaagaaatgagggatgccttccgccatgaagttttgctgattgtccactttgttctcaaggagatattcacagtttttaatttgtctttctctcctgcatggtctccaaacctgtccaaagaagccagctggctccatcatctgtaaaatcaccattgtcaccagagcacttgacttcctgttgccctacaatccacctgcactttatttcctgccaccatgataatgtagtgttactacattttacattcagctgtaagaaatgttacattcatttacttaaatcaaattaagtctgctcactcagtcccccacagtgaccaacttataaaagagaaggtacatttcagtcatcactgaggttctctctaccactggaaaactgaggaagggtctggagtccacagtggttaacatcattgcctctgttttttctcctactcaatgtaaccatccaaggttactcacaaattcacaaaaagaggtcttcacctctgctctcaagacccagagggctgggttctaaactcaaaggccaatgttccccaactttttgcattgtttcaacattggggaaaactcgaggggattcaagaatggttatataagttttgtggaaaaatgtataattttttaaaattaaaatacaaagtattatggaaagcactaaatattgaatttatataaatattccaaatatttttctaaatttttagtgagaaacttgagcttgcttctgtgagatatttattttaaaacagatttgacacttaaaatgtctaatcaagccttttaaaccatgatctatctcttcaaattcttcagatgccaccatcaataaagaaactttgttcacacaagtaagtggtagcaaatggcagggtgtttatcattttttttttttctttttttgagacggagtctcgctctgtcgcccaggctggagtgcagtggcgcgatctcagctcactgcaagttccacctgctgggttcacgcccttctcctgcctcagcctcccgagtagctgggactacaggcacctgccaccacgcccggctaattttttgtatttttagtagagacggggtttcaccgtgttagccaggatggtctcgatctcctgacctcgtgatccgcccgcctcggcctcccaaagtgctgggatgacaggcgtgagccaccgcgcccccgccgtgtttatcattttttgcctgatgaaattttccttgccactactctggatggtttgatacatttaaattgtgcttccagggtacaattatcctttaaatctatacctctttcctttcttttattgacaaatataatgttacacttttctgtcattgcagccacaccaccagtacacagatcccaacagagttgtaatattttattagtttcagagtttcaatattttatcactttcaatacttcatgtgcaggagttttatttggtacttctttacaaaataaatgatgtgcttccaagcatttcttttcaataattccaatcaatgttattaactgagtaatactagtatctgtttattcataaattcacaggaaatgcttttttacttattagtctttggaattctgttgtttgtataaacatctttcatgatggctttgtgtctaccaatagcactattgccaaaaggcacctttttcttgttcctttacttcactggtccgaagcctggtaccaacaactaccacacagactgggaaatgagcaattttgccacgtgcccttagctattaatggtggcactccataactagcatcttaagctcaatttcatgaaagaaatgtgtttcttattttgtacttgcaggcactttttaaacttgtaatcttttattcatactttaaaattaaaacagagtaatagaacccatagaaggaaatcaatacccacgagtccatactgatataaataaatagttacataaataaatggggggagaaataacagctcttccttacagaaaaatttcaattaataaatgaagaaggaattagggaaatacaacgttaccattaagcaaccacagtaataatcattacaggcaatatccaaaaataaattccaaagccagtgggcaaaagtttgaggagatacaggatattaacatagtctccaaatagctcatgctatttataaattacaaaaggaaacataacaactgtatagtgaagaaactcagcagacaccaccttagccaagtgatcaaggttaacgtcactagtaatagggcttgttgacatactggactccaatctgatacactgataaggacacatgacttctgcagtattcttaccaaaaacagaattctaatgtaattaaggaaaatgtcagacaaacctattctgagaaacattctataaaacaactaaccaatactttcaaaattgtcaaggtcataaagaccaggcgatggtcacagatttgaggagactaaggagatacaacaactaaatacacaaatggaaccatggcattcttgattggatcttgaaacagaaaaaggatattaggaagaaaagctgatgaaattctaatacattctgtagtttaattaatagtattgtaccaatattaatttcctagatttgatcattatactatggttaagtttttaacattagaggaatctgggagaatggtatatatgaactccactgttcattcaactttttcagtaactattatttcaaaataaagttgggagcggcggcccacgctgatctctaaagctttagaccacattggctcgagcatggtcatggccgtttcctggacgtcttagcgctatattataaagaaatattcacctccctgctgagcttacagggtgtacctaatgtccaacaatatgaaatctcttcaatgaattgcagcacgtccatatataacccacatggaagctgtcctctttcctcaccttcgaacttcccatgccaaagagggacctcttggactcaaatacatcttagcaatatagaagatgctggagacttgtaggagaagtggagagggtttacagtgtagccccacagaaaacaacttatgaccccatcagtcacttgtcccttttttccatgcctcagtctagtcaggaaaccactagatcctggatggcttcttctcccttcccctcctttctcttctcctctccctcccttgctcctccttcctccatcacccactccttacttccaaccaaaacttgactagctccagtctcatccctccttattgaaaactattttactcagccctcctcccccactcctgcccaatctttattccttacctacatcagacttcaccaaaacaaaggccaggataataaacaggacaaactctttcaaacacattttaatgaccatattttgttattttggtacaatttgaggagtcccaatccccagggaagactaacaagaagttctcctaacaaaggtgggtctccccttactaaaaactcctgtaatggctgaaaagagcatgaggttttctgcatatcattacacattcaatagaacgtcatgcagctgttaaaaatgatctgtagaaggctatcttgtgacagaaaggcattggagatatactgttagtgacaaaaataggttataaatgaatttttccatgcatgcctctatatttataaatacacacacataaaagacaggaaggacagacattaaacattcatagtgcttaagatgatgcatagtataatagttaggaccatggcctttgggacagaaaactacagcctctctcccacttatcagccatgggaccttgggcaatttgctcagcctcaaagcccctgttcctttatctgtgtgctggggttgttgtaagagttaagtgcaatacacagagagagagagagtacctaacatgtattatgtgctcagtcaatatgcatcatagtactcattgttacatatgttcctaagtgctttatacgttttttccctaagttgaccatctgtttttggcattatgaaacataatgatcctaacaaattaaaattaaaaacataaagaatatttgccccaaaaaaataaagaacatgaattcttcaagtagccaaggggccatagacagaagtaagcccttggtggggcttagttgagagaagtctccagaaggtctttcgtgtgttaaagaagagggtaacagggaggaggtggggagagatgttaactgagtctaaatgagcacctggaagaagagatgggacaggccacttctgcctggactccctgattgttaagaagaatgaaaaagagcagaagtcttccctgagcccaacttcactccctgacttaacctagtctttgccccttccctctcactcatggctactttctgtggtcaccttgttgtagaaatggatgtgcagccacctcatctttttctacctccttcacatgttttagataatttaatgtagtagaagacggttacagcaaaaaattacaaaaatcaaaatatctctgctatctactgttgcatttctaaccatcccaaaacagtagctgaaaacagcactcgtggtcgagcgcggtgactcatgcctttaattccagatactccggaggctgaggcaagagaatcacttgaacccggaaggtggaggttgcagtgactcaagatcatgccactgcactccagcctgggtgacacagtgagactccgtctcaaaaaaaaaaaaaaaaaaagcactcgtgtattttgttcaagatctgtggtttgggcagggcagggctcaatgaggacatctcgtctccgttcccgcagtgtcaggaagtgtaactgagactggagggtcacacagaagatggctccctcaagtggccagcaaattggtgcttacaattgacagggagctgttgaccaagggccccaattcctcttcctatggccccttctcgggctgcatgggcttctttacagaatggcagctggattccaagagcaagtatcacaacctacagaagagtggaggaatattgaaagttcacagtctcttaagacgttggcccagaaactggcaaaagcttcatttctgccatgttctattgatcagtcacagaacctgcaccaattcaagaggagaacatatagaggacatctctcaatgggataagtgtcaacaaatttgcatctatcacaatctgtcttttgggtacaaactatttctattcctccattatgcaaaatatactcacaacctcccaggggtcgcaaaagcctcatccatttatggcaaatgtggcccttttaatttatataaaataatttgcgggggcttcctttatatttttaactcccctgcgtgcagagaagtgatttaaagcccttcagaaagaatgctttattcccgtggaatttggtaacttgcttgggtgtggggaggtttgtcagctttctccactcaaattatcagaccctttccatttagtggtagaccatttccctcgtccaggccaagggcacatagtacagagaaatagggagttgttacccagggagagaacttggctctaaacctgtaatagaaaggtcagttctggtctggagggtcaattttgatctttggctcagatccaggaattggaaccaaggcttttgaacattttaatgcaggggattaaaaaaatgatacgagtcattcacgaatatatttgcttaacatctaaagagatccctcaaaacactagaaaaaataagaacaaaaatctaataaaacaaaatttgttaaacacatttaccaaatttttttttttggtaaaaattcaaatgtcataaataaagctaaagttcctcttgatgactcgctcctctgccctattccactccaagtaaccactattatcagtcttgccaatacccttccagacctctctacctctatataccattagaagcacatggttttgcattgaggatgtgcagtgttttgttttacgtaaatgttatcactctgttcttgttccataatttgcctttttctctcaatgatttgcttggctatctttctatttcagtagcatctcctttctttttaacttaccattgtttatttaaccttgcctctatcaacagatatgtaggttgtttctagttgatttcattaagtatttataaacaacgcatcagtagatgtccataaatttctttacggaagatggcaagtagtggaattgctgagccaaagaacatgtttaaaaaacccaaaaaaactagacgctaccaattttctctccaaaatggccatacccacttacccatacagagatgatttggaatctggcttcctcacaaggtgagatgccttcacagtttcattcttcctggcatgtcttcccttttgtatctgagagagctggcagaattgtgtcactaaatcaaggatagagggtcaaatgacagctcaagctcacaggcacctctgctttcttcccagaccacctgctttcctgccaccagctctgttccatcttatagaatggttgccacttgggtgtctgctccgacagccatgtcatcctttgcactgcagttatgaagcagacagagctaggagaggggctttgccagcctctgccctagcttggagaacttcaaaaaaggagggtattgaagttgaactcccccaaaaaggggtggtccccacacctcaaaaagtggtgcctccgaaagaaatgtaaaattcgtgtggggggggaaaaaggttatttagaaattgttggcttgtcgtgccgaaagtatgtgtggttacggggagtacggaaatttcgaggggtgggggcgaggccgtgtgtcctttagcccggggttttcccgtcgcatgtttaaggggggggaagaggggggatgttttctttccgcgaaggtttttgaagaacggcgtggccccccaccgccactactcaaccggccgttcacgaaacaactcgccacatccactaacccgctggctcaccacccaccgccctcccgatccccccaatccaaactcaacccccaccaccaagcgcctcccccctcccccaccctccagctcagccccaacctaccaccaaccccgactcgcccaccgaaaaccaacagcaaacccaaatgcccacaaaaccagtgtccaaaccctccttcccatcagtttggtgggcccatcaccgcttcccctggcccaggctctccttttgtgcgcttggagcagcagactgatctcccagccttcactcacttcatgtggtaatctgttgtgttcatcactgtcagaatcttctgcatcccctcactactctgctgaaaacactctagtggttcctcattgctcattaatgaaagtctagatattaaacgtagaaggcccagcacaatttgcccctatgccacctacctctctaatcttttctccttactctgacagactctccgtctgtcatttatgtattcttttattgctctcttctacttttagtatgaactggatttatggatttttttaacattgctttcaagtatggaataaagaattttatttatttatttatttatttatttgagactgggtctcactctgttgcccaggccagaatgcaatggtgcagtcatatctcactgtaacctcgaattcctaggctcaagccatcctcctgcctcagcctcctaagtagctatgactacgggtgtgcatcaccacatctggctaatggaataaaatattacaatgcctaatcttaattttcaaaattttaaattacattgtacctaatgcccatgcatttacttttttcagtgggtcaatagccctcactttggcaaaggtcccaggcccaaggtaaggccttactttttccaaactcatcttttgaaagacataagtgcctgtaagttgtaccacattaggttctaggaatttttcatcaaagactttatcagactattttcctctaagttgagaaagagctgggggcagaatatggcactgaatgactgaagagaaggcactgaaatcaggccagaggttgctggaaagagcaatgaggaacaccagcagcaatgaggagccggtgatgattttggcttcacagggaggtgtgtaccacaccgattttatctctacgtggatgaaccacagctgtcggctcccttgtctccaggacatcacactctccacattccctcccatcttccggcttctgcttcccggggccctcatctgccccatcctgggtgaacactggtcggtcaactgctgggcgtaccttcccgctctgcacaccctccctggccaccccacccactctcacggctcgcactgcagaggagccgcatctctagctccagcccatctgcctcttctgagctctaacttcatgtaggcgactcctgccggtgttgcctcacaggcccatcatacttcaaagcattttcccctcagaacaccatgtcctggctgctccctccagaagatacatctctcaagcacatccccgcggctctcacctggatgactgcattcaccttctcccacatttgccccctcctttggatgtatatagattgttttaaaatacaaatctgatgtgcttgctctcctgcttgaaacacctcaaaactgccttcaggataaaccactgcccttgacatgttcacaggttgcccatggcctggccctgcccatctcttcagcctcatctcatgccccttgcccctcgctctctgggcttctgcctccctagccctcctttaggttctctaacacaccatagtccttctagtgttggggcctctgcaagtgctgttcccattgcctgagacatgaatccctctccctatctctacctgcaccttcatctgattaatccctacccttcctactcatgatgttgctttctcagggactctctctgactttttaaactaatcagggtctccccagtatatatcttcatagcactctgtattactcctttcttaatgaccacctgctgtagacagaatgtttgtcttcctccaaaatcatatgtaaaaccttccaccagagcgatgattagagaagcctcccgactgacattcagaagatattaataagagcactaatgatggggattgcaaccatgtctttactgacttccagaagcttcttacagtaaacatgaaatcacataatttcttccactttcctactgtttcttgttctgggctctgtcctgcttactgtctaatatcttggccccttaaaagttgctaatcttccaaacctcattcctgtgactgggccgctggtccttgttcatgggccttgaagatactgactgtacacttatctggagcatccagtgcctaccacctgacccagattcctcattgcgctcctccctcctccacctaatgggatttgctcatacccgtgtgggacccctcccattttccccaactgaatacttatcaagacaacgcattgccatactccctcgtaccctgctctgggcatcagactgaatgtttgtttccattgaggatctgcagctgcatcagtttccccagcaccgtccaaccccttgagcatggctagtcctaaagcagagaattagcctttctatccctgctgctatacatgctgggacaaataataagaaatgacagcattttatgataatgcaggctgcaggaggcaggaggcaggaatcaaattcgtgcttatcaaatagtgctccaattctttgaatattggactatagaatatgtcatggatctatgctcaggtgggttccctattactcactccactgaggccaggttgtgggattagctgtccaagagggagtttcagtctcacagcatagggtcattctgagaattactggcccacacttgtgtggagacctccagagaacagaatctgggttggtgccatgtacttccaggaggagagaagtggcaggatgcccagccccacaatcagaggggaaggggcagagccacatgtatgaagatcctctccccagtacgtgccaatcacagggcttcctagcttttgggccaaggaaacaatgtgggaagcaaaaaaggacaattttctcctccctttgcatgaagactgagcagttttaccagattcccagggaaacacccttccactctgggttgaatgtgagtgagagacattcagctggaacactagaaaaactatttcctgagccactcacctttagccctagaaagtgttggatttgtccttcatctttgccacagtagagactgctgatagcatcagaacttgggctctggaattagacagatatgggtacaaatctgagctctctcacttattagtgtgggatgtagagcaacttttaaaatccttccaaacctcagacttctcatgcatgatgtgaggattgtaatagggcccacctaataggggtttttgagaattaaaaaagttattcaatgaacagcatttagcaagatgcctgaccattgagaaaataacaaattgtttattattattgttattattaaacatctttcctgcaccttctgactgggggcatcgtatcatcagaaatacttaggatgggatggattcctgcatgggctgagtcaagggtgcaataatggaggagtgaagaaggaagaaatggaggcagaaatccccaggagcccagcatggtacaaggctgagctagtgctgcagagcctccttggaacagccacagagcttgcatctggccctggaggaacctcttctagctggcaggaccagccacaacagtggccaggggatttcccagggcgtgggctcctcaggagttcatttggaccaagcctgcctggagaggggttataacagggatccttccctactggcaggtgatttacccctcggtgagaagctcaggcatttgtttgatggaaggtggaaggccctgtgctgggccagtgactatcagggatgggcgggtggctggaaaatagcaaataagacaatatgataacacagttaaccaccacactatgtgaagctacaatatgggtatctgtaatagacaattccaatgtagagaataattttaaggtgtcattctccccgccaatgccataagcacacggcctctgcctgggtttctcactgtggaatgtcctcctggtctcctcatgcccagagagtgggaagtactcctactttaacaccggctttcctgtcatttccntgcagccctcctcagccccctctgcacagggaggtttcctccctgctgctgcagtgctttgtacttgttagtggtacctgcacacaggtattggtgtccttgtctcaccaccctacatcactgtaagctccccaggagcaggcttcctgtttgactcacctgtgatcctccacctcccaccctgtagtgcctcaagcattctgtagagcacatggacgccgactaataagtacttcattatttgggtattttccaagaacaacatattgtaggaaaccattctttctaaaaaaaaaagtgtccttttaaaaaggtgaataatttttgtctaattcaaagtttattgaaaagttatgtataaaacaaggtaaaaggaacaaggaaataagggaaatgtaaagaaaattatagaaataaagtggtattttttggtaagaaagcttaaagagaaataattttaggtaagaaagaatcttacctaaaattttgtgctagaataaagtgactggctaagaaagggatgttcaaagctatttatgacaaacccacagccaatatcatactgaatgggcaaaagctggaaacattccctttgagaactggcacaagacaaggatgtcctctctcaccactcctattcaacatagtatcggaagttctggccagggcaatcaagcaagagaaagaaataaagggtattcaaataggaagagaggaagtcaaattttctccgtttgcagatgcatgattgcatatttagaaaaccccatcatttcagccccaaaactccttaagctgataagcaacttcagcaaagtctcaggatacaaaatcaatgtgcaaaaatcacaggcattcctatacaccaataatagactaacagagagccaaatcatgagtgaactcccattcacaattgctacaaagagaataaaatacctgggaatacaacttacaatggacatgaaagaccttttcagggtgaactgcaaaccactgctcaaggaaataagagaggaaacaaacaaatggaaaaacattccatgcttatggataggaagaatcaatatcgtgaaaatggccatactgcccaagtaatttatagattcaatgctatccccatcaagctaccattgactttcttcacagaattagaaaaaactaatagccaagacaatcctaagcaaaaagaacaaagctggaggcattgtgctacctgacttcaaactatactacaaggctgcagtaaccaaaacagcatggtactggtaccaaaacagatatatagaccaaaagaacagaacagaggcctcagatataacaccacacatctacaaccatctgatctttgacaaacctaacaaaaataagcaatggggaaaataattccctatttaataaatgatgttgggaaaactggttagccatatgctgaaaactgaaactggaccccttccttacaacttatacaaaaatcaactcaagatggattaaagatttaaacatggctgggcatggtggctcacgcctgtaatcccagcactttgggaggccgagatgggtggatcatgaggtcaggagatggagaccatcctgactaacacagtgaaaccctgtctctactaaaaaatacaaaaaattagctgggcatggtggtgggcgcctgtaatcccagctacttgggaagctaaggcaggagaatggtgtgaacccaggaagtggaggttgcagtgagccaagatcacgccactgcactctagcctgggcaacagagtgagactccatctcaataaataaataaatatggaactctcccaacacaataataagacaaacccccaaatgttttaaatgggcaaaaatatttgaacagacacttcacaaaagaggatatgtaaatggtcaaaaagcacatgaaaagatgttcaacaccattggtcatcagggcaaagaaaactagaaccacaatgagatgcctctgtacaccacttaaatgtccaaattaaagaaaacaagttttggcaaagttgtggagcaactgaaatgctcgtgtattgctggtagaaaaacaaaatggcataaccatcgcagataatttgttgtcagtttcttacaaagttaaacatatacttattgatatgacagttccattccaagagaaatgaaaacataagtccacacaaagacttgtacctgggtgttcatggtagctctattcataattgccaaaatctggaaacaaatcaaatgtccatcagcaatggaatggatatacaaattgtggtacacatgtacaatagaaaactactctgcaatggagagaaattaaccattgacaaacacaaaaacatggacaaacctcaaaaacattatgctgagcaaaagaagccagacacaaaagactgctcagcgcatgattccattcatatgaaatcacagaaagggtcagttgaaggtgcagagacaaaaagtagatctgcagttgcctggggatggggtgggaggttgactgctctgacgcgtaaggaaatttgggggtaggtgggggatggtgggaatattttttgaattgaattgggtaatagttttaataggtaaaatattggaccccacagtatttgagataggtttcagtcaatttagacagtttattttgccaaggttaaggatgcatccgtgacccagcctcaggaggtcctgacaacctgtgctgaaggcagtcaacatacagcttgcttttattcatcttagggagacataatacatcaatcaatgcatgtaaggtttacattggttcaatctggaaaggtgagggaacttgaagcagggagcttccaggttacaaggtagattattctcaacagaaaggaatgtctgggttatgataagcggttgtggagaccaaggttttatcttgtagatgaagcctccgggtagcaagcttcagagggaatagattgtcaaagtttcctatcagacataaggtctgtgttgatgttaatgctggtcagcttttcctgaattccaaaagggagaagggtatactggggcatgtccaaccttcccttccatcatgacctgaactagttttttcaggttaactttggaatgctcttggccaagaagaggggtccattcagatggttgggggggcttagaattttatttttggtttacagtgaagacttttcaagctagacacttaaatgagtatgttgcaaaatggcaatttcttagcacggcgacgtcctaaagaaatgctaaggtaactcaattaactatgctagaaaagagagttaagtatttaggaggatttaatatggtgttaaagttgtgaaaatcaaaatggagacactaatgttaagaaaaccctgataaatggagccagggaaggccatgaagaaagagttctcacacttgtatccctgatcatgaaaaagactctgcaaaaaacaaaaccttgcacaaaggccattgcaaccttacacaaaaaatactactttaaaaggacatgtgcccagcaactgcctgtccaacctcagactggcaatatctttgttattgatcttagtagcccagcataactatttcaaaacagtgatgtaatgctcattttttttcttttgaaaacttttgtcttcctgtaaaaacctttgtcttctttacttaccctgaatatgcacagagtttactatggagtgcatattcctgttgcaatgctctattcccaaacaaacatcattttcttttagagagcctctctctgtttgtgatttaggttggtgatgtaaagcaatggcataactgaacactgattcaaagaaaagtggcttttctctttgttgtattaaaaagaggccttataaataggatagtaagatttgtaagttgaacttaaagcatgaagaaaatttaggggccaggcagggtggctcacacctgtaatcccagcactttgggaggccaagacaggaggattgcttgagcccaggagttcaagaccagtctggtcaacacagacctcatctttactaaaaataaaaaaattaggccaggtgcagtggctcatgcctgtaatcccagcactttgggaggccaaggcgggaggatcacttgaggtcaggagttcgtgaccagcctggtcaacacgatgaaaccccatctctactaaaaatacaaaaaaattagctgggtgtggtggcgggcacctgcaatcccagctactcgggaggcttcaggcaggggaatcacttgaacctgggaggcggacattgcagtgagctgagatagtcccactgcactccagcctgggcgactcagcaagactctgcctcaaaaaaaaaaaaaaaaattagtcaggtgtggtagcacacagctgtggtcccagctactcgggaggctgaggtgggaggatcatctgagcccaggaggtcaaggctgcggtaagagctgagattgtactactgcattccagcaggggctacaaagtgagaccctgtctcaaaaaaagaaaaagaaaaagaaaattatgtttttaaatttataattataataaatttaattacataaatttaagctcaagtaattgtaaatattctttctgtgcacataagttattcttgtattgaccccacaggagctggccattcttcaagtcagaaggcctgagagaggagctgcccaggtggtcttcatggggctgtgcggccagtcatcccccacaggttgacaatccttgtgtacttcatcctcgttggatcctctgtatccctgacgatgagcaactgtgaggcccgtttcagcactgagttccagtcaggaaaacatccacccacccaccacacgctcacacttacacacacattcacacatgcacacacgttctggctccgaaaaagaaaaaaaaaaagcaatttaaaataattctgatcctttgcttatttccacaaactccatgaaaattgtacattgtccaagcaacatttcttaatattctctttttctctcatatccattttccttactgctgtctccacctttctcttccaaactccctgttaaaatccctgccccagcgaacttttattcaattttgtggaatggaggctgctctgatttaaattaaaaaaaaaaaaaaaatccctactccatgtcccagatccctagttgttttttgttttttgttttcctgagacagggtcttgtgtcttccatgctggagtgcagtggcatgatcatggctcactgcagcctcaacctcctgggctcaagtaaatctcttgcgtcagccctccccagtagctgggagttcaggtatgtgctaccatgcctagctaatttttttcttttattttgtagagacacggtcttgccaggttgcccaggctggtatagaacccctgggcttaagtgatcctcctgcctcggcttcccaaagtgctgggattacaagtgtgaggcactgcacccaggctggatccctgcatttttacagatttagcatcacaaaagtctaaacaattagactgactaaggcagaactgcccttatgacagcagacataagaaggaaaaggccaaaacactgtgttaaaaattatccaaatgtgaggaaaaggcaaagagagtaggtgtgcctttttagtgtctaagctgcctgcccaaggggcatctgatgctctcaggcaggagtccacaaatttttttttgtaaaagatcagatagtaaatcttttcagcgtgaagagcatgaggtctctgtcacaaatactcaaccaccattacaacatgaaagcagccaacagacaacacatgacaaatgagtgtggctgtgttccagtaaatcttgattacaaaaacaggcaagaggccagagctgacccatgggccatagtttgctgaccccttctgtaaaggaaagtatttttgtttgacttgctgtttaccattgattgaacacaaggctctgtagagttacttgttaacttgcagaagattgatgagtggcaagtaatttttattcaccagaatatannattattctgttcagtagataagataaacccactgttatattactgtcttgtttagaatgtgactttgattcattttttcacaaattcatattattgccctaatttgtatataagtatgcttcttttaaaaatatatattttttaataaatttgagacagggtctcactaggttgcccagccttttgctataatgagagcataaagtgaatttcacactttagcctagtgcatagatgggattacaggcacaaaccactgcatgcagctaactttgcttctcattccagcacgttctattccnnngnttttcatatacgcgtctcttaatgccgcattcagcccaagttttcttcagtgttaaggtttttgttactctgtgcccaaatgtccttccaaaaaggttaagtttttttaccttcctgccaacattatatgaaagtgtccacttttgtagacttttaccaatgctgactacttttggtttcaaaaaagctctcagtaattttctattaattacttttacccttttttattgagggtgttcaactttttattgttagcatattctctctgggctccattggacgccttggcagctttttggtagtaggtgcctttagaaaagtccttctcgtctggccctttctgagcaaatctagtgaacagaattggctccatgctcagcattgcttaatacggttgatccagggcctaggactcattccttcattaccatccacttgcattgtcttaaagcaaggctctattaatttaatttggcatttcctgtcccagctctttagtttcattaaacaaaggctttagaaaactcccagtagatgcctatgttgcttccttttaaaaaattttggagctgtttccctagcctaaccttttcttcagggcaggagttaagtcccttctactgcattcctgtgaagatggtgattcaagaggcagggcacctgttgctttgtgaaacagtccactctgcagctgggcagctctgttactagaatgttctcccttctggggagccaatattttgatgtcctctgtgaatctcatctgcttatcccatctgtttatgtccttgaagatgcacaggtctgacaccacgaggtagcccttagaaatttgatggcatttctgatgtgtccccaactcttctccaaccactcctcccagagcttgtttcttaagccccttgtggagctgattgctttcctcaaggcagctcagtttttcccagtttgctcctggtggtcctgaaatatgattgactcctgaatactccaggtgtgaaggagagtgggggtggcctttctacttgtcatggcctgggttttaagttgctgtccagtggagcagaggtgactttcccagtgaactacattttttcccctctaaatccttagcaattttgtctccagaggcaagacctggccaaaccatttgtgttgaggattgaatcaagaatgattgaggagatgacagtagtcccccctcatctgaggagggcgtgttccaagcccctcagtgaatgcctgaaactgtggatagtacccaactctatatgtctatgattttcctataaattaatacatgcctgtgacaatgtttaatttataaattaggcaaagaggccaggcgcagtggctcaagcctgtaatcccagcactttaggaggctgaggcctcacctgaggtcaggagttcgagaccagcctgaccaacatggagaaaccccgcctctactaaaaatacaaaattagctgggcatggtggcaggcgcctgtaatcccagctactcgggaggctgaggcaggagaatcacttgaacccgggaggcgggatttgcggtgagctgagatcgtctcattgcactacagcctgggcaacaagagtgaaactccgactcaaaaaaaaaaaaaaaaattaggcaaagaaagaaattaacaacaataagtaatgaaatagaacaattctaacaatatactataataaaagttgtatgaatgtggtctctttctcaaaattaccttttttttttgagacagggtctcactttattgcccaggctggagtgcagtggcacgatcacagcttactgctgcctcgacctcctgggaccaagtgatcctcccactttagcctcctgagtagctgggaccacaggcatgcaccactgtatctggataattttgtttatttttttttgcagagagaggaggtctcactatgtttcccaggctggttttgaatgcctgggcccaagggatcctcctgccttggcctcccaaagtattgggattacaagcgtgagccaccatgcctgccccaaaattatcttattgttctatacccactcttcttcttgtgatgatgtgaggtgatccattgcctccttgatgagatgaagtgaggtgactgatgtgggcatagtgatgcagtgtttaggctgatattggcctgatgatatgtcagaaggagggtcatctgcttcggtgatcctggatcatagagtcatgatgatgtcaatggttggatgtcaggagcagacgatgtcaatgactaacgataagctggacaggtgggatggtggcacaagattttatcacgctactcagaatggagcacaatttaaaacttctgaattgtttatttttggaatttttcattaatatttttggattgcagttgactgtgggtaactgaaactgtggaatgtgagactgtggaaaagtgagggagtactgtattatggaactgtaactctattcggtaggggaacagaattcacatttgtggggcccaggtctctgcatctgtagggatccaattgtttcatttctcgttgtagcaaaaacttggctttggaatcagacagattgatgtttgctatcattctaaatgggtgcagctacactttcctcaagaggtagttctgaaaatttaacaaaatgtgaatttcttggtaaaaaaaaaaaacctcaaaaatattcagtttcctttcctttgtgtctgatgtactccatcaaatactgggaaatatgtgtctctcatagaaatgtcatggatctttgtaattctgattatccacaaaccttggggattagctgtttcaatgttcctattttacagataagaaaatggagcctgtggtaagttaagtgagttactcatggctacttaactaatattttactaggtgataggccagagctagagcccaggtcaccttcttatcaatgctctgccttgtctctgtgccttcctgtctgtctgtatgtgtatgtgcctgttgacagtaaggcatagtttaacccagtagaactaccggtttgtaatgaattccacttgtaaatgactgaccattcaaggaacaagtgttttttctatgcttgacacctgttttggatgccaaaaaggatacaaatgtaacttcagacactctgggcctcattttgcactcattagcatgtccaaaattaaaaagactgaccacaccaaatattggtgaggatgtggaagaacgggaactttcatacactgctggtggggatgtaaaatggtacaatccctttgggtaacagtttgacagtttcttaaaaagttagacatatatatttaccatatgactcagcccttccacttctaggtctttacccaagagaaatgaaatgctgtgcttttacaaatgtctatacaggaatgtacatagcaaccttatttgtcattgcaaaaaacagagacaattcaacgttgtcaagagtgaatggatgagcaagctgtggtctgtctatgcaatggtatcctactcagccagacaaagatatggctaatgacaacaatgtcatgcataagatgacgatggcctgggtgattgatgcaaacaaggataaagaaaataatcaattttgtccccattttcaaagacagatagcagcagcaagagtgtaagtctgaggaaagtcatattccttcctcctacaacatagcacacacacttacaaaaacaatacacagactcctggccaatggacttcaaaactgaggaggatcattaaatttaaatgttcaccgctgcatgaaatctccctgggtcctgccctcccttccccaccctcctccacttgggccggggcacagcagtgattctctcacctctcagagtgagccagtgttggctgcattgaaggctccagatatgcaaacagggcagatattcctggaccagggtgcacagagtgaggctccaacgcaccctattaactgcatgaaggatgaatgagcctctggtatgggctgggacagaaaaaaggattcaaggggcccaaaagggtttgggtggaacctaccaggagcggcagtacagactccttgggaaggtggccatgatttagccacattcaccaataggataatctggagaatttcctagcttgagtttctgggagaaagcagatttctggattatctggtgacaggtaacagggccgagttcatccacagccacctgcagtgttagcaccttaagctgagttccttgcaccaggatgctgtcacgcccagtcagtgtgagacggttcttggctgaaggactgaaaagcttgggtaagtgacttcacctaagcctctatctcttgctcccgtaagtcagggctcattgtggctccttgcaggcttgacttcagggttaacagagaaaatgaaggtacaagtgccttgtgaactctgaaactccaaaccagtcattctcaaagtgccgtccaccagtctagcacatcagcatcactggaagcttgtttgaaatgtaaattatcaggtcctccagagctatgtatgaattagaaactctgggaatggggccctgcaatctatttcaacaggtcctccaggtgattctgatgcaagttaaagcctgagaaactctgtcctatacaaatggatgtcaactcaagctgctcttcagaatcacctatagcacttgttcacccgaatccctgagaatggagcttcaggactgctatttctcaaagtttgcctggtgatcctgagatggggtttgggggacagagatccaaggtgctaccaggtgtgaggaattgttagaaggcaaacctggctgtcatctagggtgcttaaagggtacagatcctaggattctgcctcttacagctgaatcagactttcctagaatgggattgctgtccaatggcatgcctcctgggtgactctgatgtatagcctgggctgggaaccaccagaggattatcttccattgaccaagctgacaaactcgcttaaggctctgagtttcacacttgattttctagcccctgtccttccatggatcacctgcccccttccctcctaatcaggagcacagtcagtggatgcactaatgtggcctctccttggctgcagggaacaggtggaaatgtggccataggtgtgcagggctgcctgccatgtattaatagctacagatttgaaagatccaaggacaagagactagaaaaaaatttaaaacagccaagcattggcccagtaatggcatttcagaaatccaccaaaatattaagatgctttttgaaaaatatccagagcactcatgtaaaagtgcttaattattaataaaagctgacatgtgttgggtacttcctgtgggtctggcactaggctaattatgtttttaggagttgactcaaatgctccctgtcataattatgtgaaaaaatataattattagctccatggtacaaattaaggagaggttacataaataaaaaggaatgatactcaaattagtaaccagagcccatgctcttaaacactatgctattatttgtggactcttacataggtggcaaaagtcaaaggctagattgacttctgtccacttccagccaagatgaagtacaagattcagatacacccttccgcattaaacaacttaggaatcagacaaaatatacaaagcattgtttgttacacattggataacagacagcactagatagtcgtgtctgagaaaagcggtgaaatgagctgagtcttagaattgccccagtttactaaggggcatagtaagggcatagctgcagcacaaagaagcagaacccaacagagactggcgttcacctgagttgagaaaaccaagttgaaaatttaggaacactaacacagatatgtaggcaagagtatcagagaggagacagttgtagggaaaaagagagctttacagagagacagcgagagctccagagacccgcagaagattgccctgacgtcactagctgagtaccgatcagtgcatacatgtaaggatattactcaatatgtggaaaagaacagaaggaatgatgtccaaagctcacccaaagacaggaatcatttatgtttccaccagccagagtggaacaaccttgtaacgcatatggagtactcaaacgaatatttcctcaataataagttcaaattaactgagactaaagcctgcccgctttgtctggacatgcctaacaaagctttgagggaagcctcaaaagaatgaaaccgtgtccaagtaatttaactgtgtcccagaaaaaaattcaagaacatttaaataaatattaaaatatgatcaaacccagcaaggttaaattcaaaatgtctggcatccattaaaaaattaccagccttgaaaattggcgggaaaatattattcataatgaaaagaaaaagcaatcaacagaaacaggcctagaaagtatacatatgataaaattagcagacattaaatggttatgattaatttattttatatgttaaagaaggtagagaagagcataagcacattaaagagagacaggaaagtcccagtactcacacagggccaggagcagttttcaccagtcaggtgggaaaacttcatatttcatggagcattggtagagtacacagtgtcttgccttagtagagggataaatgctgttctgttcccgcctaacccatcttgaaagaaaatctgaaaggatcaaactgtattcaagtaacctaatcacatcccagcacacagctcgactagttataaaaacacaaaatattaatatctagaaacacaaaaataatatctagcacccaacaaggtaaaattcacaatgtctagcattcaattgaaattttctaggccatcaaagaagcagtaaaatatgacctataaggccgggcacattggctcatgcctgtaatcccagcactctgggaggccaaggtgggtggctcacccggaggtcaggagttcaagaccagcctggtcaacatggtgagacctcatctctactaaaaatataaaaattagcccagcatggtggtgggcgcctgtaatcccagctactcaggaggttgaggcaggagaatcgcttgaacctgggagaaggagaccgcagtgagccaagatggcaccaatgcactgcagcctcattagagaacatcgggaaggaaactaaaggcttatttaaagcgcgagaccgtggcgcctttggactggaccctttctaatgatcatttagtatcaggctatgtgggagttgaccgttttgcatagcctgaaagccaacagtatcactcctcctctaggtgtggcagagatgtgagagaaggagactgacagtctgtgggtgtgtatgcagtgttgggggaagcgaggcacaggggacaatactgtggtgtagaaaactagtctaaggtagcatcaggaaattcatgaaaccaaaatgaatttcataacagcacaagacattatttgtttttgcctccctctcatttttttttttttttgaaacagagtcttgctctgtcatccatgctcgtgtgcagtggtgcaatctcggctcactgcaacctccacctccagggttcaagcaattctcatgcctcagcctcctgagtagctgattacaggtctgcaccaccccgccggctagtttttgtatttttagtagagatggggttttgtaatgttggccaggctgccctgtcattttttttttactagtgtccagtggagttttttaggggctacataacatgatactgtcattaatctaatggctaatgaaagggatatgtatatgtttttgtgtttaaaacaaacttctttggggtcctcaataatttttaagagtataaaggggtcctgagatcaaagagtttgagttctgctggactgggacagtggttgtcaacccagattgtacattagggtcatctgggaagctttaaaatagtactgatgcccaaccttaccgcaaaccaattaagccagaatctctgtggatgagaagtcttcattgtcatcatcaccatgaccatcatcattgtcaccgtcactacaccattatcatcatcatcatatcatcttcattatcattgttagtatctccatcaccatcatcagcatcaccattattatcatcatcatcatccccaccatcatcctcatcggaacttcacctgcatggaggacaatccactatgcattaggtgctatgctatttgctatactccttattctcacaactgcccagagaggctgatattatctcactttataacaggaggaatctggatcggaaaagttaaggtaagctaattcacagagcgagaagagatagagccaggattcgaaaccagttctctgctacatcaatgttcccagtccttgcactattgagaacctctttagttatgctttcacccctccaacaccacagtaaattttttctttttttaaaaaaattatactttaagttatagggtatatgtgcataatgtgcaggtttgttacatatgtatacatgtgccatgttggtgtgctgcactcattaactcgtcatttacattaggtatatcttctaatgctatccctccccgctctccccaccccatgacaggccctggtgtgtgatgttccccaccctgtgtccaagtgttctcattgttcagttcccacctatgagtgagaacatgtggtgtttggttttctgtccttgtgatagtttgctcagaatgatggtttccagcttcatccacgtccctacaaaggatatgaactcatccttttttatggctgcatagtattccatggtgtatgtgtgccacattttcttaatccagtctatcattgctggacatttgggttggttccaagtctttgctattgtgaatagtgccacagtgaacattcatgtgcatgtgtctttatagcagcatgatttataatcctttgggtatatacccagtaatgggatggctgggtcaaatggtatttctagttctagatccttgaggaattgccacactgtctaccacaatggttgaattagtttatagccccaccaacagtgtaaaagcattcctatttctccacatcctctccagcacctgttgtttcgtgactttttagtgattgccattctaactggcaccacagtaaatttttatagattttataagcaaattgtatttactgtgcaagaattggtttattttttaaaccatgtgttgcaaacatacaatggttaattgtgatatttgctcagtacaagatcatcagatcactacacagacttgaggtaattccacctaaaagcaaagagaactgaccccacattaactgagaagtctttacttatttattccctataaacgagccaatatgaagagaaggccttaatgtggttaactatgtaatttttttctgactttttgaaatactgagaagagctcatgactctcccatctcctaattctaccttggtggattttagactgaccacaactcatgggtaaatgagggaagacgaataagaaaccttgcttttttttcctccttgtttttggctggctgcagtggctcacacctgtaatctcatcactttgggaggccaaggtgggaagatcacttgagctcaggatttcaaaactggcctgggcaacatagtgagaccccatctctaaaaaaaaaaaaaaaaaaaaaaaaggcgacgggcggtgcgtgcctgtaatcctacctactcaaaaagccgaggtggaaagatcacttgagcatgggaggtcaaagctgcagtgaaccttgattgcaccacttcattccagcctgggtgacaaagcaggacgctgcctcaaaaaaacaaaaacaaaaccttaattttttggctattcttttctggtaagaatggtatagagatggggatgaggatggctattgtatgagagagcaaacagggtccaagcagtgctctgggctgtctaaggaccagtagtcagcttaacttctcaaatttccagggaaggagttcggagtggtagaatatcctgggtatgcccaaagcatcaccttgcaaatagcctgtcatgaataatttgtttcatttgttatgactggaaactggctttgtgtatgccagagaatgggggcaggaaagagagattggtgtcttgagctctctgtgcctctggggcagtgatgcttttcctctcatgtggaaggagagcatgactgaaaaggtgcacaaataaggtgtctgtgagagaaattaaccttccagatacagagacacaaccttccccaagaggtcctcattgctctgccttttttccttttttttgcttgttctaccattaataacagaaactgattatgacctcaaaagagaggagaaagcgactctccccaccctagagctagttaaccaccatatcttcctagatctcagttcaagagtcacttccatccccaataaaagcccttgagtgctgagcacctctccgtcatagcatttgtcctaggggtttttgtacattttcttgtgtgaaacttgggttgacatctgtatttccgactagattacagtttcctcaagggtagggatgtcttgcttgccattttcagttccagcatctagacagtacctcaagcaaacaaggccgaggggggtgcggatcacgaggtcaggagttcgagaccagcctgatgaacatggtgaaaccccgtctctactaaaaatataaaaattagccaggcgtggtggcaggtgcctgtaattccagctactcaggagtctgaggtaggagaatcgcttgaacccgggaggtggaggttgcagtgacctgagatccactgcactccagcttgggtgacagagcaagacttcgtctcaaaaaaaaaaaaaaaaaaagaaagagaaaagaacatcaaatgaatgaatgagtgagatgaatgagttagcagtgttggatttaagtgtcagattcttcccagcttgacttttttctttggcttagtgattttgaggtcncaagatttattttcctttcacaaaggtgatcactaccataagatcttcagaaaaagaatgtggcaagccangtctcactaatgcaaatctctataacaactgtatcagtactgaggtgtcataaatatggaccgatagatgaatacaggtaggatgggacacaatctaagatcccaggggggggagaccacacgcttggttagggagacccaaagtggaccgtgtggccagaagagtcccgcactgcactctagtgacagtgcagaaagtcactgtgggaaatctagaagtttctacaggttgctatttcatcatagcactgtgcaggccaacccttcctgctccactggctgttgggaaaagctttctcttttcttcctagccagggagctctcaaagtgttccactctctcacctccacccaggcgtccaggtgtggaggacacttgccggctgcttgtctgctgactcatcccttggtttcacttggaaaacctaccaccagctggcctctttccaagcatcagcctcctcattttcttaatcccttaggtgtgatctcacctccacacagtagattgcctcaaggcccaattccaatatgaataaaaatgattattttgtcatcttccaatcttccttttaaaatattattttataattccctttaggaggatcacctaagtgaagactatttttacctaagaaatgttaaaatgtaaagacatggttgtaatctggggattcctgttaaaatggctagcagacagaagtcagacgacaggctagaaatgtgtgaagagtggttgcctttgaaaggcggagttggtaatgattttcttccatttttccatgctttccaattctctacaaaggccttaatattacttcgataaccaggacctctgataacctgcccccaccgagtaaagacttagctgggaaagtcagcttcatgtgaggtaaaaggaaccaggtaatacacaattcccactgccaactgtcgggtgtgcaggcctgagcttcctgcatgtgggaggaaagagaaagaagagagaaactccaagatccaagagatccagcaagaaggctggagtctgaggacgcagaaagctgaatggcacagttaccactattgtgctgaggttctgtggcctctgggtctcttgacaactgggcaaagacccacagaaaactatctctagaccctacctgtgggaggggaaagtgcttcagatcatctacaggacagccacctggacctcaaatggcttacagttccttcatccagagggtcttcatctagtacataccaggtgctaagcctgggtgctggagacatgacggggaacccatttaccatggctttgttactgtgacattcacatctagggaaagccagcaaaggggagggatcgaggagagcttgttaggcagagaaaatacccaagggcaagggagaagccagcctgttctgagcacacacagtggttccatctaactgggcctcagtgccaggttggactggagatggggctgaggagctgtcacagagcattctggacacagatgtcacatagtcccttgaggttagggtccttaggcatggcagcattgctttgagtttttccttttgtaatgttgccattcatgacaatgtggaagatgggtccttgcagagaagggcagggctgtgagaccagttaggagactaagatgtgagccaaggaaaatgaggaacacctgaacactggggcaggtgcagggcccagagagaagcagatggcttcctgaggttttaagtaggtagaatcaaggcagctggtaaagatcttttattacatataaactggaataagccatctgctccaagacaaaagagtaggcggaaaacaatacaagacagaaatggaattagaacaaacctgggaggaatgtggaattagagtagagagtccaacactggctgcaatcataaaaatgtaaaacaaacaaaaatttgctaggtgtgcttacttagaaataattagctgtcatattaagttcacttgtgttatggcttaaatgtgtcccccaaaatgtgatgtgttggaaacttgatccccaatgcaacagagttgagagatgggacctttaaaaggtgattaggtcataagggttctgccctcataaatgaattaatactgttatcatgagagtagattcctgataaaaggatgatctctgcctcctccccacagccctcttgtgcatgctttcctgcctttccaccttctgctatgggatgacacagcaagaaggccctcaccagatgcagctccttgatcttggactttccagcctccagaactgtaagccaaacaaatttctgtttattataaattacccagtctcaggtattctgttctagaagcacaaaatggactaagatcattagattatcattttttatcagactgttgaagtgaaaaataaaaatcaaataaagaaattaagagagctgcatgcagcagctcatgcctataatcccagcactttgggaggccaaggcaggtggattgcctgagctcaggagtttcagaccagcctgggcaacacggtgaaaccctgtttctactaaaatacaaaaaactaggccgggcgcggtggctcacgtctgtaatcccagcactttgggaggccgaggcgggtggatcatgaggtcaggagatcgagaccatcctggctaacaaggtgaaaccccgtctctactaaaaatacaaaaaaaattagccgggcgcggtggcgggcgcctgtagtcccagctactcgggaggctgaggcaggagaatggcgtgaaacccgggaagcggagcttgcagtgagccgagattgcgccactgcagtccgcagtcccgcctgggcgacagagcgagactccgtctcaaaaaaaaaaaaaaaaactagccaggcatggtggtgtgtgcctatagtcccagctacttgggaggctgaggcaggagaattgcttgaacccaggaggtggaggttgcagtgagctgagatcataccactgcactccaatccagcctgggtgacaaagcaagactacatttcaaaaaaaaaaagaaagaaaaagaaaaaaagaaaagaaaaagaaattaagagaagggcaggtattaaccccaaatatcccaccatagggacacattaaagtttgcttggccactcccctagcataatatatggaatgtcttcaaggaccctctgttgtaaatacaaggccctgctggacttaatacaacctgcaggctttgagatccctactctgttgccatctctcataggatttgcagaccaaatccaaatacttaaaatagcaacactcacaaacatgcaaatcagagcagaaaagaaacttctaaaaggccctgaaactacactttatgagagaagacaatagggacctgagggtggtagaattttctctctatgcatctatgtttccagggctcactttctcaataaactcttaaattgcttttaaagtaagggaacaagcaaacattacatttaagagaaatcaatttcataaagaaggggggatgtccagggtactttgcttccatgttttgcttccatgaatttgtgtttaacagaagatgcagaaaaacacacaattattgcaaaatcaaggaaatccactctaaacatcccttggtttcccaggccagtgtcacaactgaaaacacatattgtggctaattatgtgtcacaaattagaatgacaaggcaagaaaaaaaaaactctctgattaactaatagcagccaacacagacagcctgtgtagctcgactctgctggtttataaaaggcagaagaagcaaacggcttctgtgaccgcaacaggaagggcctctgctcttaataaataaataacatttaaattattctcccccatttgcaaagcattttccaactcattatctcatctgaccaggtattattgtatctgaccaagaacttgtatacnaaataaagaataaaaaataaatatgggccangcacagtggctcatgcttgtaatcccancactttgggaggcccaggcgggtggatcacttgaggtcagtagtttgagaccagtctggccgacatggcgaaaccccgtctctactaaaaatacaaaaattagcccggcatggtggcacatgcctgtaatcccaactacttgggaggctgaggcacgagaattgcttgaactcgagaggcggaggttgcagtgagccgagactgcggccattgccctccagcctgggcgatgagagcgaaacttcatcgaaaaaacaaaaacaaaacaaaacaaaaaacaccttagaagaagcgttcctcctcttgctttctgaagacactctacgctgaaacagtaactttcaataaaccatctcttctcaccgcactctgcgacttgccttgaattcctttgtgtgcaagatccaataagcctctcttgcggtctggatgagaaccctttttttggaatactctgacacaacaaattgcagaaagaaagtctcacatgtataaaataagcaaaaagattctctggcatctgaagaaacaatttccttgtcaatattagtatcactataagtgtagaacaacctgttgtatgatgctacataaagtatatgaatctgaatactgttggatacaaagggagactatnnaatgtaatacgtcgcccgaaatgactacactgttggtgatctttctttcaagaagcanaatattgcctcnaacatcctgtacatggtataaaattttacccagcaagaacaccaatacaacggggggggcgttctttgtgaggggtggggaggtcaattttttggaacctgcagcaggtaacacacaaaacttccacagctgctaccagctttccaggagagcctgtgtacctggagaggagaaggcaagtgcttccgaacttgacttgatgtcttagattctgcaatgcgtagtctgtagggacaggctgtagcttatcctataggcttgggctggagtcagcaagcatctgggctggcagaagataaaagatgcaaaggtggaggaaagcatacgtggtctggaagacagacttggtgggtgggtggctgctacaacaccctagttagaggtagaggggtaagtcagtgtgtcttctgcacaggcctcttccccacctcattcttcatttcccatacagccttgctgagttattcacaaacatctgattcaactggaagctgggttgaggatgacctaaaggactagtgtgatgcctgcccaggggtgtgggcccatagtcagagtccagagcctcctctcagcttttagcacatctcacccacatcctgggtccttaattagcaatatgaaagcaagccaagtgacaagattttgtccctgggaagtccagaagcactccttttctcatttgtataagcataatgatttgcttacataaataatcatgaaaattcaaatccctctcagaaatcaggtcataaaaccatgaaatgcagcatgtgggcaagaatcacagggaaaggtaggtcttggaaaagaaaggatggcagggaggaagaaagcagggtgccaggggccctgggctgctgtccaagtcaggtggctcaccgtctctgagaacatttcactttctggtaaatggggcagttggagatagaagggttgggtgaatgccaagagtgagcacagctgaggtcagtgctgtgcctgcagtccaggcgggagtagaaatcctgggcccatcttacctccgacctcatttcctcctctgtaataatgtgggggtgggggaaagttctggtcatcagccctagcattccatggttcatttcctcatcagtgatggaaaatcaccaagcaagagaacaggatggagaataaccggatgggtgcaatcggaggtgctatttcaggtgaggtggccagggaaggccctctgaaagggtggcttgagcaggtggctgaatgtacagaagctgccaatcatgaaagatctggggtacagcatgccaagcagaggaaatgcgagtgcaaaggccccgagattggatgtgggcttagcacaaatgtggcatggcaagaaggccagtgtggctgaagcagcatgaacaatgggtggaggggctgagaggacagaggagcaggaaagagccaggcttgggtaggagaggtgtcaacttgatatatgatgcaaagcccttggaggttcccaaacacaaaagcaatgatctaatatatggttttaaaaatgccactcttggccgggcgcggtggctcacgcctgtaatcccagcactttgggaggccgaggcgggtggatcatgaggtcaggagatcgagaccatcctggctaacaaggtgaaaccccgtctctactaaaaatacaaaaaattagccgggcgcggtggcgggcgcctgtagtcccagctactcgggaggctgaggcaggagaatggcgtgaacccgggaggcggagcttgcagtgagccgagattgcgccactgcagtccgcagtccggcctgggcgacagagcgagactccgtctcaaaaaaaaaaaaaaaaaaaaaatgccactcttgctgtgaaaaattgaccctgggggaaggaggagtagaaatgtcaaaagtggaagcagaccactcaggaggtcagggcaatggactgtgcaggagagactgacatcttagactcgggcaataggagagaaggtggtgaggattatattctgggcataaaggcaacagaactagctgatggcgtcaacgtaggagatgagggaaagaaagaaatcaaagggcattcataggtttgagggttgagtaactggggatatttaacagaaatggagaagtctggggaaggggcaagtattgtgggggcaggggtcaaaagttctgtattttggccaagttaattaatatttgagatacctcttaggtgtccaagtgaagatgtcaaacagtcaattgaatacaaaatctgaatcttagcccaggatggtctcacacctgtaatcccagcactttgggaggctgaggtgagaggatcacttgaggccaggagtttgtgatcagcctgggcaatagagcaagaccctgtctccacacacacacacacacacaaaaagtcatccaggcatggtggcacatgcctgtagtcccagctactcaggaagctgaggcaggaggatcacttgagcccatggttcaaggctgcagtgagctataatcacatcactcaatactacactccagcctggatgacagagagagacctcatttattaaaataaaatttaaaaaaattaattaaaaataaatccaaatctttcctgagattcatattcaggagtaactgtcatgtagaaggcatataatgccatgggtcacatgataccatctaatgaatgccactggaaaagagagaatagctaaaaactgagcactgggcacaccagcacagtgaggttggaaggaagaaatggagctaacaaaggagacaaaagaggagtagccagtgagaagagagaaacatctggagagaagagagagcagcaaaaggtgggtgaaggagaatgtggtccaccaggcccaacaatgctgagcagttgagtaagtgaggacctggccactgaatttggcaagaaagaggatgtcagcggccctagaacaaaagtgaagaagagcttgaggacggaagcctgacaggagtgaactgaggagagaatgaaaggtggagacatggagccaaggagcactgagactcccttgagtagttttgctgtaaaataaaagtgagtgcagagacggggcagggggacagagaaatgcaggggtagctggagggagccacagaatcaaaagagggtttttgtgtttaagatggtagttgtcacatagcacattagtaagttcatgtgaatcacaacgtaggtgagacagatcactaatgcaggagtcaaatccttgcagagcccccagaggaggtgatgaagggaagtgatggacatcattcagatgcaagtaggttagcaattcctggggtacaaataggaggtgactcctttctgattgctcctgttttctgaatgagatagcacataaagtccactcagccatgttagctgttgaagtccttgtggctgtcatgcctgtacagactgggctctcctctccagcatttcctctcagactaagctgagctgcactagccgctgccacatcctcttggggccatcctctgccacactccacatattgctgtggtttgcttgcaacccctggaaggtcctactggctgctcctagaagagtctgggcggcatctctcccttactcgttatcacatggtgctgtaagcagtggccacacactttagctggtgggatgggccatcacaggcagtaaatgcgaaagactgctcagattttaaagcacccatgaatcagtagaatgagtttagaattgtagtcatcaacacacattaaaaaaaaaaaaaacaggcactaaaaaaattagttgagtaggataaagccataaaagatattaactacaacccagataggaggtgcaaaattgtccttacataaatcagatggaaaaagttgaaagcagataagataaaataggtaagcatgacatttaaaaggtattcatgggacgtggttacaaaaccaactcacaactaaaaagtcttaggacctctcgctgacttaggagcctgatcccaactttgagaatgactcagtgtgttaccctgtggctagtgtagaccaatgatcctgtctcagagtcactagccaacagcccatatcaagtaattgaaactttgactcagaaacctcagtgtcagaacctttgacttaggaaccacctgtagtggttaactgcaatttgcaccccttagttcagggctttacaacaccgggggcggggagggggaaggcatagagctgatgacctaaaggaaacccattgcagcaacgcttttgtgttaagtttacaaataagtgttgttttagaatcctccaggtaatgcctttgttatttaatgtgtctgagacaattctgcacattaaagaatataaaatattaccttgtaattccaatttgaaatgtgtaattgacattagacttctattttaatttgaaatgtctaaaacaatgtggttaagtttgtaaaaggtgtgtgaattttgagtctgatttactacatttttttttaattttctttttttttggagttttagggattgcttagatggctagaaagatcgctaggcacatgtccgatgtgtgtacgtgtgtgcaaataccgtgccttttttgttttcttttgttgaaacagagtctcactctgtcgcccaggctagaatgtagtggcgtgatgtcagctcactgcaacctccgcctcccaggttccagtgattctcccgcctcagcctcccaagtaactgggattacaggcgcccaccaacacgcccagctaatttttgtatttttagtagagacggggtttcaccatgttggccaggctggtctctaactcctgacctcgagatccacccacctcgacctcccaaagtgctgggattacaggcatgagccaccatgcctggccaatactgtgccattttattatcagggacttgagcatccatggattttggcatccataggggtcctgtaaccaatactgcacaaataccaagggacaactgtattctaaaaagaccaaaaattaataagcaggacgctgaaggtaattgccccaataaagtcatgatcccttgcccagtgtctgaacctcagccagttttcatactcaggacctattggctgcagaggtggtaggaaccatatgagaatcctgcaatatcatggcaagtatgcactttaatgatatctgcagtccttccccaaaaggaccttacatttaccatactgctatgtcctgcgtgagagggtaatactcagattttttttttttttttttttacacaacgtcttactgtgttgcccacactggagtgcactggctcgatcttagctcactgcaacttctgttttctgggctcaagtgattctcctgcctcagtttcctgagtagctgggattacaggcgcccgccaccatgcctggctaatttttgtatttttagtagagacggagttttgccatgttggccaggctggtcttgaactcctgacctcatgtgatccgctggcctcccaaagtgctgagattccagcgtgcgcggccatacccggccgggaattctttatatattctgaaaactaatcctttgtgagacataagtgttgtaaatattgtatcccagtttgtggcatgtatttttaatttttaatggtgtctctcaatgaaaaaagcttaacacttaaatgaggtcaaattgatcacctttttatttatggttgattcctttggtgtcatgtgtaaggaatgttgttccttcctgtcccaaagttgcaaagatttcttgtgtattttgtcctaaaagttttaaagttttgcttttcccatctgtgcacatttcacatttgctacatctcactgactgcttcctctgctgcagagcaagctccatgagagcaggaggcatgggtcctgcttcttgttggtccccagagccctatgtcatgactaggacctggcaggggactagtgagtagctcctgactaactgactcaatgaatgaatgattggatgattgaacaaagtggtatgggagttcacagcgagtaagagatgccttagaagagatgaagaaggagatggtatagggtagtggttctcaattctgggtccatggtggactcacctggggacccttaaaatgtaccgtggaggatcccagcccaagagattctgtatgactggtctaagatgtggtctgggcaccaggtgatcccagtgtgcagccaggcctgaggccactggatttggtggtaaatgaggtaactatcaagggtacagacgttggttgccaacaggcttgggcttgaatttaagctttgtcactgacttgctgtgtcctcctgcactcgttgagcctgttttctcacctgagagatgggtgtgataacacctacctgctgtagttgttgtgagagttagaggagataagcatgttcctggaatgaagtgtgttcttaatccatcataggttttttgcttgtttgtttgtttgtttgtttgttttttccttttcaagaatgaggttgagccagactttgacagctgggtgggaagtgaacatgtggtgattgggagagaagggcagtttatgtgaagggaatgtaataattagagagtgggcgtgggaagacatgctggggagagtgagcaggccggttagccctggtagagggtgcaagagagcagtgcggaatctgccagggagacaggtgggtgaccagggtgccaagggtgtggcttttcccaggttcccatggacacagccatcctcccagatgcccagcctagctgtgagtgagcaagagttctggattgtctctctcactctgtctttttctctcattccagaaacaaagcagtgactggtacttaggaggagaatcaggtcaagttgggagaaacttgcttctgctcaggggagcagaagcaagaatggaggccccacccatgctggaagatgatgagggttttggttcagggaggaggaatattggggatctaaaggggcctgggagtggggcaggaccctgccttaggacaggtagaaacattttctataaaaaatggggtggaggttgatggtaggaccaggcatctttagttggctccctggagtgtcaagcccttgagatggtctttaaaagccatgcagtggggtttgaatctggtgttcaagctcataggttattaacataatgacacttggaaactatttgggagagctcaagtgagtggcctggaagttctgtgttggtgcaggaggtgacttaggatgtgctgctccagactcatatctttgactgcacacctgatgcttcatctggctatcctgtaagcaccttcaacttaacatgtcctacacagaactcttgatattcctgttcctcccccagttcctcagttcttaccaaatgttcttccagttacccaattgctcaagtaaaaaatctaagtccttctcttggatttctgcctgttccctcaacatcccacctatccatgagtgttctgtgggccctgcctctgaaataaatcctgcctttgtctcccagttcactccagccacccatcctggggctgcaccctcctccttccaagccctctccctttccttcctggtgctgcctgtcatgtcaagcatatgcatcagtgcgaccaggacatttgaaatgcaaccagtacaattgggcgcggttatgcctaccagtttttcttccttaaacattttatatttatgtttgaaagcatgccacctttcttcacttgccaacttgacagatttattagttgacaacatccgctgatagcatcagtaataagttaattgtttttgcacatgtagctttaattattctcattatcatttataggagttattctttgtaaagggtaactgagttttccaaaacaaacagaaatttggggtgggcccatggagcgtgactcatgaaatcagattcttagaaggacctcggcaagtctctgggttgctgttaatgagcctggctggctgccaggggtgtgtctgccctttatgaggccaccactgttcaaatgcttgcctgcagcattacttgcctaggtagtgcttgtttctactgaactgtcagggatccaattctttgtggtctaagtaacaatactcagattcacaaggaattgattaataagccagaatgccaatgtattacatttttgatgaagaccatatttacagtgattgtatctgctcaagctcaaattaggattagagttctgacaaatacatatgtgagaagtatgaggttaaatacttgaaatttggacttttctagaaaatctgaatgtgattgccattcacatacctttctggggatgatgattcttgtacttttattttaaaagacatagaaaactaacttaagaatcagattgcttggctgggcacagtggctcatgcctgtaatgccagcactttgggaggccaaggtgagtggattgcttgagctcaggagtttgagatcagcctgggcaacatggtgaaatcccatctctaccaaaaatacaaaaaaaaaaaaaaaaacaaccaaaaagaataaattagctaggtgtgatggtgcgtgcttgtagttccagctacttgggaggatgaggtggaagaattgcttgagcccaggaggtggaggtttcagtgagctggggttgcaacagtgtactccagcctgggcgatagagtgagactccgtctcaaaaaaaaaaaaatcagattgctttattgctggttttctttctaaaactgagattgggtcccatcatcccctggcccccattggttaatggttcctcctttgtctattgaataaaatacagatgtctgcttttggcaacatggttgaatgtagacactgcagggtcttcctgactcaaaatgatttaggcttagataaaacacatttggaaatgcatttctggattaacaccaaggaaaggagatctctttaaatcccctttctgttcccccctccctaccccctccaattgggcttaagtaagaagggtggttacccgctagtaaacccccttcgaagggggtcttctcctctaagggaaaacccttgttttgacatttgcttcaatgggcccttgtattttgttccttgctaaacgggtgctaaaccaggggcctcctcttaaggcttttagaatatttgcacactttagaaatggaaatgtttttggggggcgagttgtcttaatatttcatttttctagcttgtgtgacatccttttgaaagcagcaattctggcctttgtgagagatggtgaatgcctgcaggtgtgtggaccagtgcgtcccttccttcctacatgcacggcccccagctgggcccagcagagtgctgttacagaataatttccaagggctgtgtctctaacctttggtcttgtcccccattgctgtagatttggccaattgacttcataagtgcctcttatgaacatagatgttggcaatggaagttgaggaccagtcagtggttgttttattgaacacacagcgtaaatcccaacacaatgctgacctaagagaattccagccactctgattctcagtctctttatatctgaaagggttctgttccactttttcccagatcaaaatgtccctgcagctactcagcagagctgtcgcaacttatacgtagaagaggtaacagtccacaaacagaaaggcacaggacgagagtggtctgggtgatgcttcctgtgggggaaaaggtgatgagggtgcatctgcacacctatgttcataggtaagtctgggaggaggtgacctcccctttggttgaggtgctgaggcgtcttgttagaatggcactattccatttatctgatgcagtctgtgggaattttgtggtatggccaccacaggtaccatgctgggaacaatgccagatactgcctgctaagccacagcatgagtcacatgagcatttgtgggctttgggaactaaagttattgaacgatagttatctgaaaaggaatttagggaaaggggactttagtccagcgaacagtttgcaaaccagggggaaggcagccttcagcgtaaaatgaagacgtgtgtgccccaaataacaaagggagagtttgtcttttagagagtaaatgtccacgcaaggttccacttaggcaaatgaaagatgcaaacttgcttagttctgatttgtttacatttgctgaattcggattggtccgtgcaggcttttctgggaactccaaatacatgtatgacctctagtcatacatggcaaatggccgcttggctctaatttgaatttaggcccagttagtcactcaggattaacctttttcagggttcacagctctgaacaatggacttagacctgcaggacataatctgttcctaactctgggactacctgtgccttttgactgtgcccagtgagcagctgtggctctgggcccagacccacagggcgataaggcacagaggtacgcatggagcaggctgtccttgctgagtgatcatgaagatacacttacatagagcagcacttttccttccagtctttgtgatttaactcattagatccttataacaagagtcagtcctctatttaacccatgaagcacaggtggagtccaagcttagtttgtgaaggatgagccaaaaggattcttctcttgtagacctcaagctcagctctctccatgggccctggagtaggtgagaaggcctctgtcttccagagcccactgccaatcatctacattttctgttagcccaattctaggacattgctttaccaactgaagggtgagaactatcataagttataaaaatcaattgaaaaacaaaaaggtacagaacagaaaataaaagatgagaatctattaaacatagtgatgttactggaaaagggggtctcaaaccagaccccaagagagagtccttggatttcacacaggaaagaactcaaggtgagttgcagggtgcggtgaattgagagagtttattgaaagctattccattacaaagtagagcatcctcagacagcaagtggaggaacatgccatcattaaatttttcttatataggaatcttgtctatataaagactaaactaagctgtggctatgtgtgggtgggccgacagcatgaaaacatttattctcctattgatttaaagagaactatccttgacattttagtgtgtttaagtacatcaaagcataactataattatcttgaaagcatatatttttatagggattgggacatctgggctttctgttgttgtagaagtttgtccttgcagggattaccaagccacttccttagctgtaaacatcttagggccatgggtcctgactggcaaggaatgtgtcttgctagttttaagatgggcttgatttgaaaatggtgtccatctggctctcctaggctcctgctttcctaacagtaagggtaaatgctatgttatgaaatgtcatttctgcctttagcttgcaaactcttgatggtgaaattctcctgtccgttttcagtggggtatttattctgcatccacgtcttcacaaggagctgaaaacaaattggatggaagcaactgggttttatgggacacgttaatgttttaatgtcatttggtgtggaattcagatgtccaagcaacattttacactacaaatctgcaactttaataatcactcaaagtacctgaacctcaatgctttcagacagacttggtataaagccaccacctctttctattatggcagccctatcctgaggacacaaatttctgcagggcttctggcatatctctgattaaacaaatgtcaacaaggttaaaacaaatgtcatctctgatttgtttgttttaaagcctggatttactcattgaatatttcactcctactagcatgtcttgtagtagttttcttcagggaccctaattattgctattaaaaatatgtgtgcagctacatgttttttttttatcaatttgcaatgaaaactttaattgaataatctattagtgttattatttgaaagtgaaatcttttccttttgctttcttgttctcacacatagtgcagacagtttccacacgggctcataaaaggaatgattctgccttgtgtgaactttttgcctttattgttaattgcaccattttgtgactggcttcttgaccctgttgtaaccaagctcataatgtacattatttcttattttgcagttgtagacacttgaggaagttcccattctttgtttcttcttgcttttgttccctgtgataactttttcatgcagacattttttttttttttttttttgagaccgagtcttgctctgtcatccaggctggagtgcagtggcatgatcttggctcactgcaacctctgcctcccaggttcaagagattctcctgcttcagcctttctagtagctaggattgcaggcgtgcactaccacacccagctaaatttttcaaattagccaccccacctggctaatttttgtatttttagtagagacagggtttcaaccatgttggccaggctggtctcgaccaggtgatccacccgccttagcctcgcatagttgcaggtgctattctgagctcagggctctggcagctacaagcccaagatgcggtctccaacatgtggccattcaatgtcatggcgccctctactggtcctgggaagcgcagctctgccagtagctccagcagggcacagctgttaagtcgtgatgttctacaggtgaccaaagggcaatctctggactccttagccgctaggtcctctctgtagcaggacccaggagaaggcaggggctgaggatggctctcttagacatttgtgatgaaccaaacgtgtgcattcatgaaacttctgtgagcaagcaggtgagtagagttgggttataaaaagtcttagggtctcactacagagatggacttgctgtgtagatggtgcagagccgctgaagagttctacttggggtaatggtgtgattgggtttgcgttttaggaagatttcttggccagaatgaggcgggcaacccagagcagggagtggccacatgtgggtgtgcagttatgggccactaatccaggtgataaatggtgtctctgaacttcaggtgggggtgccacatgtctccatctgctctgtacccttgagactggccttatgggctgccttagtggtctgttgtcctctatctcctggttgggctcaggcaatgggagatcagagggaggaaagagagcttggttagagtgcacccgcgccccttcaggttggcagtggccacattcccctatacagaaggccacagtttctgtcagtggccctcccacagccccagctttctcagtgggccagccacctccccatcccttgctcctcctcctccagagagggttgtggatttccactgtcagcagtgcctggagctccaccatctcctgctgcttcctctggacctgcctgcagttttataaataacctttccttacattacctctagcatgcaccttttgtgtgtatactctgccccctgtcagcacatgactcatgccaaagagtttgaatttttttctccaggcaacgggaggtcattggaggattttagacattgagaacagatgtgtattgtggaaatatctgtctgactgaagtgaccaggatggtccaaaagagcgagaatttgaggcaagcaaaccatcagcaggccagcagcagaaatccaggtcataaacagggaagctgaggctcacagggttggatcagggaatgggagagggaagccaaacaattccatgagcatgtcagttgcacatatgacttggtaactatttttatttttatttttatgttttgagacagagtctcgctctgtcacacaggccagagtgtagtggcatgatcacagctctctgcaacctctgcctcctaggttcaaacaattctcctgcctcaaccttccaggtagctgggactacaggtgcgcaccactacacccaactaagttgtgtatttttagtagagatgagcattcacgctgttgccttagacacggaatattgattatttgaccagaaattcatgcagctaaccgtgacccctggcaaaataaaatagtgtatatgtacgtgcatatacatgcaaagaaatgagttgaaactagaaggatgtcaatcaaatgataacatggtcatcttggggtcggagtacatttggggatgaggggagctgtaaaagcagacttggaccttttcttctaccagtaccgtgtcatttgaattttggaaagaaaaaaaaaaactcagaaggaggagaaggagcaggaggagaagaagatggatcttaagtgatttgcccgggagcaccttgagaaggtgagattcaagtctaggtctaagctttctaattccatgagtgggagtgacccacgtccaagaggaagctcaaaaggaagatgttctccatcatctcttgctcatcctaacagcatgcaaaaccacatccaatgcagctcagaaaactcccaaattgccaaatttcattggaaacacttaatgctgtggtttccaatttcaactgtaaagtaggtatgtatgccattgttaccattaacttctcagaaatggagagagctctctttccgcctcctccccctctgctgtggctttggtgagacgtgcactcaggctcacctgtctccatgatctccagtaagtacacatgagcagagaggcctcagctcagctcttcctggtcccaccagggttgattctttgagaattctagaatgccacatcctaggccccccaaagaaatcctgcatcttacccccagaaatatgaatcatagcaaatttcaaatcaaccatcgtttaatactcacagactgggcacatccaaaaacatattttcagttttacaacagtgcctggtgcatatcggcactatttgtggaagcaataaatcgacacggagctgaaacacaaacaaatgccaaattgtttttataacacctgattttctttctgtttctttatgcagtttagttttgttttgcttaactctacctcagaccatagtctggtaaactcaccacccagaagctcccttgaaatgtgggtatgcagccactaggtggcaggagagagtttcctgcctggagggaggacagccactctgtccccgggtcaggccagggccaccctgctacctgcaaaattagcatggggctttatgaaccacagcttcctaataaacacaggatctgtttgatagagactccaaaacacgcctacctagtgatgaaagactcaacttcagaagaaaaccttcatggcaaacatcttcagagatgtttccaacttaaggttctgaacacagacgcttccccagaaagccattgtttctcagcacctgggagccttgctttgctttgcttacagactcgctgttcttaaatcactgccaagataacatctgtctcttctcttaccctctatttcgatataaggactcctcactcttgttgcttcctattggctacctctccacagggagaaatcgctgatttaacagcagtcaatatcccaaatctggaacagggaacagggaagcatttaaaaattggagaatttaggccgggcacagtggctcatgcctgtaatctcagcactttgggaggtcgacgtggatggatcacttaggagttcgagaccaagcctgggcaacatggcgaaacctcatctctacaaaaaaaaaaaaaaaaaaaaaaaaaaaaaaaaacccaaaaattagccgggcatggtagtgcacacctgtgagccccagctactcaggaggctgaggtggcaagactgcttgagccctgaggtcgaggctgcagtgagccgagatcacaccactgcacttcagcctgggcaacagagtgagaccttgtcccagataaataaattaaattaatttaattagaggatttaaggattttccctacagacacctccttattttctctggccttttctgactactctccctaactccctgctcctctggtctcccaaaactactccagaaaaaaaaaagggggggagggactaaaggaaagccaggtgacagtgccagtgtgacagatgacaaagcatctgcccgaacaaaccgtaggtccctgaactttctccaagacctgtctgtggacttacctatgaaaaccagttttagcaaaaaccctcctaagccagtttatcaagatccccttatcctcaatatccatctgattggattcttcatcccccaccattccccagtgatgtcaccaggcctttcttcagcaacagtagttagtgggtgtagccaggacgccccctcacccctgatatgcccttttagtaattcttcatccacaggttcccaccctgctcctaggctatacattcccatttgcccatgctgcattcggaattgagcccagttctatactgaggtcttacttcacctctcgccatagtcctgaataaaattggttttcacatttaaaaactgtccagctctggttgttccttgacacagggtaatttttattccatgtgatagtttgccttacctcagcctacacccctcaaacctgcaactctatattcaagaaccagacagccctttccaacagataggaagaggctgccctggtgcaaaggaagaggctctgggaggaaggagagaacccgaaggctgccccctcctctagactgagctctgggatgggtggacgataaaacccagatacgtttagacatctgagcgtggagaggactttgctttgcttccacagggaccccaaggaaactgcaagccctccagagactaaaaacagcagaacagcaagaaatggcagcaaaggtctgggcagaatcatcctatgtgggcacagacacaaacagagtcccctgtggccccaggagagtttaaagaagatccagaggctgtcctattccatatctcagcagagacaggcccgtgagcctaaaagctgatcattaggacaagaaggacacgaactgtcctgcagcgtgaaccgcgtggaacaaggccaatcaccagacaccagaccagccagacacagccccgcagttccccaagaccaccacggacccatcgcccctcaccaatagctccaggctacatagaccccctccacttcatggatgtcctcagagcagaaaggggaggcaggagtggaaccctgacttggttcagttgaaacataaaatgactgtactattattgaattgctgaagtttacgtgaaagaaatgagatttagtttttggccacagtgcaaaataagaaacgaggcttcaactgagattaaggtgagttataggaaaatgtactcccttgaaggacctgtgaagtgtgttcgctatgagaaaatgaccagaatccacgttcttagctgcgggactcaggctgactcctgtttctggagcttgcacaaagggcagggaaatccctgtttcaggcacagtgatttcaatgtttaaaagaaaacaggtgggccctggcaatcatgataacatgtcataagtttacatctctgtgaggcaggtagtgtaatccccattttgcaaaggaggaaaccgaggctgaaagcagctacatggtctcttcaatgtggcccaaatgttggagaacagagcttaactgaatcagcaattctatacttagaactgactctctctttattatatctcactactaccttgatatttgaaatattcaacttttttcaatcaaaaaataacaataatttaggcataatgactactatgtcatttaatttcttgctgatatttcaatatcccatgccaggaatattgaaagctcagctccttaagagctgactatggcatcaactcccaacaaccatccttccagaaatattttcccctttcttttgttatagagtggcactgccctatatggtgaccacttgccacatgtggctgttgaacacttgaaattggcttgtcagaattgcagtgtaaagtgtaaaacacataccaaatttcaaagacatggcacataataaaaaatgtaaaatatctcattaacaatttttatattgactgtgtaagtaacattttgaatatattggattaaatacatggatgatgccccaacacccacagtcccttatcaagtctctacttcacatttttgtacttctgacttagaaatagcactggcgtctaagagcctattaatgtcgtcaataggttcttgggaaccacaattttaaacaaaatgacatataagaaaacgaataacattgaacaaaatgacattattcgaggacctgctgcatgttgtttcacttaaagtcagtgtccaagaacctatcagtgacatttagtgaggacttgctgtccttcctgtttacaggaacctgggcaagttacttaattcctctaagcctggtttatatccctgcaaagagagaaggataataatcaccagtacttagtgatgtcgtaaggagaaaataaaataataaatatgaaatggctgacagtgtccttgtcacacagaagatgtgtgatccacagtagctgctattgtctgcctcacttcactagtaatggtccagggaggcctttaatgtgcatggtgcagtacattcacatgttggacatgggtgaagggaaagaccaggctcatctaaacacaataggatgcttgtggtgttttgaggaggaatcaaggactagttatccacagctgtaacatgcatggatcaaaagagataaggcacacaaaagactttgtcagtagcaaagcattacaaaatgcagagaccagctgtgggtggtggtgagtcagacccagcttccctctgtgcctggctgagtggttctgggcaagtcacgccatctgtcttgatgcccttccccatctatagagagggagcaactgaggccccttccaatactgaagtcctttatttctgctactttagaaatatccacatttttggtaaattcaaatgatccaatgattccatttcctaatgttcaaaactagccccagaaacatctaaatgaatcaaacaaataaaatatttattgtgtatgttttgattgctgaaacttctattttagcaacacacacacacacacacagaacccataagccttcatctttccttggataaacgagccttcctgtctggccatttaagtcacgattaagtaaatgatttccaactcgccttttgcagcagttcagatgggtctttcctgcgtggcagtggccctcctgacttatgatttcctgtgtgtcggcctgttaccactgcagcttaactgaggaaacaagaacaaaacagcttctgaccccaagagactgttggaggcaaaggcttcagtcccaagaacctcacacgtggggagcccgagagcccagccctgaccttttctccagtaataacataagaaacaacaggcactggccttattttggatacaaagagtggtgcttttccttaaatcttcctttagtcagggctaccccttcatggacgccccaacatccatggttcctgcttgagtccctgcttccatattcctgcacttctcacttgaaatatccctggagtacgttaagcagccaggtttggaagttcttgctgtgcaggcgggtgtgtgcatgtcctctctctcaacaggacacaagctccccaaatcagacggtatgcctccacgccccttcccaagcctccccagcagcaccgagcatgtgaggggagctggggcccaggccatgatgggaagcactctctgcctaaagactagggtgatgcgccctcaactgtgggaatgagccccagctctggtgtctgcctcggtttttcctcctggacaatcaacatgaactcctcacccctcttatccactttgcataaactgaaaataacaaacccagggctctttctgtcacaggaaagggtttttttttataaaattaaacagagatgattcaacacacccaggatataacacatgggccatgaatcaagggcagcattgctctggtcagcctgttgtttgggcccccttggcagggctctcccctgaatcttcccctcttgactcccatcancacagcactccanctttgtgttacaggcgataaatgggaaaggggtaaatcattcttaattagagaaacgctcattaaactagacacccaaattctctggggggggatcattcttacaagcatgcccttctctcttaaagagagagcacttttttcgcaaataatgctgccatgaacatacggggtgcatgtatcttcgtaatagaatgatttctattttggggggtatgtacccagcaataggattgctgggtcaaatggtatttctggttctagatcttcgagatcttccacaccgtcttccacaatggttgaactaattcacattcctaccaacagtgtgaaagcattcctatttctctgcaacctcgccagcacctgttatttcttgactttttaataatcgtcattctgactagcatgagagacagtatctcgttgaggatttgatgtgcattttgctaatgatcagtgatgttgagctttttttcatatgttttttggctgcaagaatgtcttcttttgagaagtgtctgttcatgtcctttgcccactttttaatgggggtttgttttttcttgtaaatttgtttaagctccttatagactcacaataacaaagacatgggatcaacctaaatgtccatcaatgatataacggataaagaaaatgtggtacatatataccatggaatagtatgcagccataaaaaagaatgggatcatatcctttgaaaggacatggatgagctggaaaccatgatcctcagcaaactatgcaagaacagaaaacaattgttgcatgctctcacttataagtgggagctgaacactgagaacacagggacacagagaggggaacaacacacatttggggcctgtcaggggtgaggtgggggagggagagcattaggaaaaatagctaatgcatgctgggcttaatacctaggtgatgggttgacaggtgcagcaaatcactgtggcacacatttacctatgtaacaaacctgcacatcctgcacacgtaccccaggacttcaaaataaagagagacaatacttctcccttaagtgtctactgttgctttgcaataaaaacttcctgcctttcacttcactctgacttgtccctgaattctttctcgtgatggtgtcaagaacgtggacactggctggggctggagactcaccagcatccggagaccctcctgagccctccagcaatacaactttgacacaaactatgaaatcacagatccaagaagctcaaagaacccaagcacaggaaacatgatgaaactacatgaaggaacatcagaattgaattgttcaaaatcagtgataaagagtaaatcttaaaagcaaccagaacaaaatatccatcatatacgcagaaataaagataagtatgacagcagatttacaaatagaaaaaaaaacaagtgcagcaacagaaacaaactatcaatccataattctatacctagtgaaaatttctttcaaaacaaaggtgaaataaaaaaattattttcaggaatacaaaagcgaaaaaattaatcactagcattcatcactgcaagaaatgttaaaggaagtcctttaggcagaaagaaaatgatacaaggtgaatatttggatccctgcaaggaactaaaaagatccagaactgataacttaatgggtaaacatgtaattttcatcaacaagtgaatgaataaacaaatcatgatatatccatatgatagactactacttagaatacaaaagaagaactacttatgcatgtgataacatgaatgatattcaaaattattattgagtgaaagacaccagatcaaaacaaagtacatactgtatgattctgtttatataaaactctataaattgcatgctcttctatagtgacagaaagaagatcagtggctgcctgcagacaggaagagattacaaacggaaatgagaattccttaagagatgatggacatgctcattacccatcatatgtatacagccataatggttttacagatacatatatatgtacacgccaacataaatataagttatcaaattacagtaagttctgacttaatgtcactaggttcctggaaactttgactttaagcaaaatgatgtacagtgaaaccaattttaccataggctaattgatataaagatgagttaggtttttggtttttttttttttgacatgaagtctcgctctatcgcccaggcaggagaagaagagttaggttttacagcatgtttctggtcacaagaacatcatcaaacttgtaaataaaggcacaaaacacttctaatattaaatatcaaaataaatatgagttatacagaatttaagaaagattaataaaaacaagtaaaatcattatttatgggatttttggtaatcagtgagttatgtggtcatagtggaagtgggttaagtcaagaaataaatgtttgcaaaacaaaaattttaaagatcctctcctaccaccacacaaaaaacaagaaaacacggtgggctcgctaagcacttttgtaccactcgtatcttatgcgtttgtatgattattgtaaatgctttatgataatttttagagacagggtctcactctgtgtctcaggctggagtgaagtggtgcaatcatagctcactgcagtctcaacctcccggattcaagagatcctcccacctcagcctccagtgtagctaggactacagttgtgtgccaccatgcccatctatcttcttttttattttttgtagagacaggggttgtgctttgttgcccaggctagtcttcaactcctgggctcaagcaatcctcctgcctcagcctcccaaaatgctgggatttcggacatgagccagcagcaccttgcccagcattttatttcataataattataagtcattccttcattcatcttacaacccacttgttccagttcaggatctcgggtgaccagaacctattaacgttcacgcacaagtcagaaaccagccctggacaggacaccatcctaccgcagggagaacttacacacccacactcactcagactgggaccatgcaaagaacctaacgtgcactttggaatgtgtgttccatacccactagaacagctaaaatttaaaagactgaccatacttgagtgttgaacaggatgtgacacaactaaatcttttaagcgcttctgcgtaaatggcacagccgctttggaaaacagttggcagtttttcaagttaaatatacccaaactctatgatccacttctcaacaatcaaacaagagaaataaaagcaatgtctacacaaagatgtatacacaaatgttcattgcagccttaattatactagccccaagttgaaacaagccaaatgtccattaccagatgactggaacatacaaattgtggtatattgatacaatgaaatactacttagtaataaaaaagaaagagctattaacataagcaacaacatggatgaatctgaaaacaattatgctaagtgaaaacagccacacaaaagttacatactgtatgatcacatctacataaaattacagaaaaggcaaactaatctatagacagaaaagcagatgagtggttacctagggatggggcagaagggacgaaaggatggattgcaaaatagcacaaaaatattggagggatgacaaatatattcattatcttgattgtggggatagtttaatgggtatatatagagatcaaagctcatctaattatacactttaaatatatgtatttcattgtgcatcagttattcatcaacaagactataaaataatatatgcctacatacatttttaaatattcaaaatctcacagttatatacataaatgcaactgaatatgtattcagatgttttaacaagcagaaaggactgattaaactcatgacagcggctgtttctgggaagggtgtaggagacaagagatggaaaagaggatgagagccagaagagacccttgtaatgtttcctttcttttagtaaaaatatattgacagttaaagctgagaggtgagaataatagtctcatggcttttgtgtccttaaaatttcacaaactaagtgaaatgggagaaagcaaaaaaataaacttaaataaatgttatattgcccaaaaagagatttaaaatggaggttagacacatgagacttacgttctcaaaaaagtagaatctgcagggaagtttaacaactataaagaattaaaatctagcttctaccagcccaaagcctaaaatgttctgctttattcttccttattataattcataggtaatatattttatgtttgcaaatgaatgcagtgatattagatctctaagaggtgctaaaaatgaaaagtacatattccaatttttcccaattttccttctctttccatgaatgaaaaatatacatatttgatgatttccaagtttatacaaccgatctttctcttagttttctcttaccaaattccctccctcactcagccaccagccagtccaactgtgctacctgcacagcagccctcataccatccacactctcatcaggatcctgcctgacctgcgaggagcagcagcaagaaggagacagaacctccacgctgagcatctcagggctttctcagagactccagaggaccctgatagggacagagcctggccagcaatccatgctgccagctgtatgattgtgggcatgtaaattctcaactgaaaatgggtgtaataataacatgttcttcccagaatgagctttatgaagatcatatagctgtttggaactcagacaagcactggtaggaatacaaacaggggagccaacagcctataaataatactttaagaaagggcatgaatgtaattacttaggaacaaaaggcaaagtggagagatgcctaggactgagctggacaagctgcaccctttagtggctcagcccatgggctgacaaggaaaatggaggagctaccaaagaaggtggaaggattctgggagagtggccctcaccctgcccagggcagggctcagtgggagagagggagatctgttataaatgctgccaggaggtcgagtcatgtgagaatgtccatgtgaaaacatccactgtgtgtatctaaagagagtggctgtaaaacaggtcagggtcaaaggtcttattgtctcagatgttatctgcatgcattgtctcacgaccaagaaaactaaggagcatggacacaaagggttaggttgaagcaaaaatttaataagtgaaagaagaaggctctctgcagtggagaggggagtctgagtgggttgccactttgacagctgaatccaaaagcttttataagaaactcttctcatatctgcagctgtttgagtaacttctcttacctataaaactgtctgtataactctcccttatctatgcagctgtgggatgtctccaggtaagcataaagtgtagcttctcttgtttgtataactgtgggtttgttttaggcaagcccccatcccctccctgtgtaagctcccatggagcccaccatgtgcatatctgagaagtggaggaagctttctctgggagctcactgatcgtacaaagaacaagaggcttctgtgccgcttatctattcaggtgcagcctgagttttccccaggctgctctatttttgcctgtagctatgatttttcaggcaggctgcttctctgaagactagccttaactgtctacctatcagatttttccttttcttctccctcagctggttcccctcaccaaggctgagcaagtgaaaaggagggcacagggcaggccagtagtgagcagcaacaaggaactaagacagcagaaaccactcttcacacctgggttgaaaggggtggggagccaggactacagctcaggtaagaacataggtaaagagatactgttgttgtgttgtttttaactatgagaagcattgagctttaaatttctacaggaaggatccagttcagacaggagcacccaatattcagaagagaagaacatggtgtaaaggtcctgggaaggctgagaggattgggactcagaatccagagcagaagccgtctgtgaacagaagaaggacctcccccagtgtagcaagagggagggaggagggacagatgccaagatggttcaggaagaaggtttggtggtaaatgtgaggctgtgctcacctgctggcttcaattttctctttaaaatgtcagatggaatcatttgatgaaggccatgccatgcaatgaaatggcagtctgaggcatggagcagctccagcttagcccgtgtttagggtaattatggctccaacccaggagatgaatatgactagggaaagtgaagtccaaaaacaaatggtctcaagttgactgtgagtcttctgggaggctgagacgacaggtggggttgacaagggaaggggaacccacctgctgaaaaacatcaggctgttggctgggggaggggtgaggcctgtgttgtagagatggatggatgcctaaagttgggtaaaggtttcaactctaccctctgctgggtgtggaaataaacaaagaccacccaaatgagaacaaacaaagactatttatccagagcttgctctgacaagggagtcggcaaccatcacttgcttggcagagactcagaagtaagcaggggagaaagcctcatagcagaaagaagggaagtcttcatgtatgccctgagtggcagctgtagatgtgggtgagttgcaggtggctaactagaaatgggggactcctgtgtgattgattaggagcatgtttggctttctctggttggtcctacattggaagagggaacaaaaaatttagggcagttgtcagttattaatcaagtgttggccatttttgactgactgttacaggagtgactggctccctggattgtttgctagaaatagtggtcttcacttcctgcaagtctgactttctggtaataggcttcctgggttggctattgtggataataagtgggtttcctgagctgatttctgcagattgtggatcagagttattttatataaacagtctgaccattttccactggcatattccatcttccaagagctggccaagctgctgtcttatctgtctcccccagcccctccactctggctgtgaaaatacaagccactaggtgaggaatggggacaattgaagactgaaagcttttctttgctgggttcgcagagctgaggaaagaaatgacaacatccaagtgtctgccctgggccagttttaggactgtagtggtaatgcaaggactgtgtgagtttatattttcatttgtctctctaactaaggtggaaaaaaaaaaacagaaaattgtctgtctgcagtctctgcaaaagtctaacactgtgcttcccaacattgcagccattagccacaggtgagtatcaagcactttaaatgagactggtccaaactgagatgtgctctgagaataaaacacacagcagatttcaaagacctagtacatgccctgatttcaagctatattacaaagctgtggtaatcaaaacagtatggcattgggaaaaaaatagacacattggtcaatgtgacagaatagagagcccagaaataaacccgtgcatgtatagtcaactaatctttgacaagagtaccaagaatacacaatggggaaagtctcttcaataagtggtgttgggaaaactagatatccacatgcaaaagaaagaaattagacccttgtattacacaaaatctaaaattaattcaaaatagaaaaagacttacatgtaagatctaaaaccataaaactcctagaagaaaacatagggaaagagctccttgacactggcattagcagtaatttttcagatataacatcaaaagtacaggcaatgaaagcaaaaacaagtgagagtatatcaaactaaaaagtttctgcacagcataaacaatcaacagagtaaagacatgacgtatggaatgagagaaaatattgacatctgacaaagggttaatatccaaaatatataagtaattcacacaactcagtaacaaaagccaaataacctgacttttttttaaaatgggcaaagtacctgaataggtattcctcaaaagaagacatacaaatggccaagagatgtatgaaaagctgcttaacataactaatcatcagagaaatacacaaatcaaaacaagatatcatctcacacctgttagaatggctattattaaaaaatgagataagtgttggccaggtgtggaggaaaggaaacccttgtacattattcataggaatgtaaattagtacagccattatggagaacagtatggagattccctaacaaaattaaaaatagaattaccatatgacccagcaattccacttcaaggaatacattcaaatactatcagtatctcaataagatacttgcactcctatgttcgttgcagcgttattcaccatagccaagatacagaaacaagttaaatgtccatcaacagataaatggataaagaaaatcaggtacatatatatatacaatggaatattattcagcaaaatcctgacatctgagataacctggataaacctggaggacattatgctaagtaaaatcaaagcctgacacagaaagacaaataccacataatctcacttacatatgaaatatgaaaatgttaattttatggaaacagagtagaatggtagttgccagagcctgagagtagagaaaatgagatgcttgtcaaatcaaatcatcacattgaatatatataatctatttgtcaattaaatattttaagaataaaaaatacctggcaccaaaaaaagaatgcaaaatgtctcaacaatgttatatgtattgcattttgaagtgataataatttgaatattaggttaaataaaatatatttgaaaaattaacttcacctatttctttccatttttgttaacataggtacaaaaaaaaattaaaattacctatgtggctcatgtaggtggctcacattatactttgatgacactatacaggctggtgaccatatatctcttagactagtctaagtgatttaacagtggttccagaaagatccaggtttaacaccaatgaaagggccagctggcttagcccagcttgtgtgggaaatgttggggagtggtttaagacagggaaaagcaaaacttttgatgctattgactttttgaaaaatcttttgtggctgaaaaaaccaaaacattattgctcgagtgtgtctctaaagcctttcccccattggctccactatacgcactctcctggtttcctcccctctagccgctgtctttggtctcctttctgattttgctgcgtcctctgtcccctgaatgattgcttctccactacggggtgattttgctccccaggggacatttggcaatatctggagaggtctatggttgtgtttgagggtgttgctactgccatctagtggggagaggctaaagatgctgttaatgcccaggacagtccccataacacagaattattcagctcaaaatatccatggtgccaagatcaagaaaccctgctcaaatattagcatgtgctgaaggcccttctctttcctttagcaatatctgcctccttagggatcttttctagtctcagtggtttaacatttaaaatcccaaattaggcaataaattgggccccaaacttcgttagtataaaatgtagaactgtgttattagaaggctaataaaatgacctggtgagcatctgcagctagcctctgagcaattctggggaccacgtgcaagataaatccatctgttccctctctgtaatgtggcgctaccttgtggccgatttttcctcgggttaaatatctctggggatgcaacttgtcgtggttaatggctgtgtgaggccagcgcgtggtgataaaggaatcaatcaagacaatattgaatttagaaaggcagatttatttagagaaaaggagagatacgttgcaagggagcaatgggcaatacagcagagggaaggctgtctgcaaagaggcaagggctacgtatgacgtagggctgcttaggctgaatgcttgcagacaagatgcttgcgtgcaggtgggctgtgagctgagtgcttgggtgctagtgagccattggcagctgaccctatttcttggaacattcgctccctgcaagcattttaatgttaaaccgccaggtcagtttgaattttcttttttctttttttttttttttttttgcctttagtaggacctgccgttgtgagactatctgaggtaaattagacaccctcctggtttaagtcaccgctccagtgactaggcagggagctcttccttgaagagggtgtgggcagtgggtactttgcatgttgtccacaccaggcgagctgctgcttcagggcctttgcatttgctcttttctttgcccaaaatgcacttctctcactgttcacatgatttttctccctcttttccttttagtctttgcttaaatatcaccttctagggaggccttcccacaccacctcttcaagatttgagggtatgcacccccacccctagccttcttatccctctccactgctttcttctcaaagcacttgttacgttcaaataaaatagattagttactttatagttctaattttactattttttgtttacttcatcaatacccatgtaatctctggaaggaacgtttctttttgtagtgtatttctagcacctagaacagtacttggcacatggcaggtgttcaaaagtatttgttgattattttctcaaagggcatggagtcttagaagtttgagaacacagttctaagcacagctgtttagagactatggatgatgctaatggctgtattcccagtaggtggggcaattctcaaattgacctggaatccttgagatctggggacagtcaccaagcactgggctctgtggggagagatgtgctggtttttagagaggagaatagcatcctgggggacttggccccagggctttcctgtcccaatctcttcccaactgagtcccagaggcaggaggccttgtctgtagctggtcagtcctgtaactgtttccctcccatctacacagatgcaaagaaggctgagaaaagcaagctgtcaggtgagcaggggccctgactcctccccagaaggcactcagaacttccatagggcaactggaaagaaggttctacttcctcaccggcagctgttgctggggaaaaaaccagcctcaggccctaccctgtgctgagaacctgaatccagtatcaggttctccaacaaacttggatccagctgaccctcacaaggggtcagatgcaaccttgtagcatatggaaaatggcagcaaggtccttgtgtggactatgcctagaatctaaattaagacaaggcctcagaggggctaagtgacatctgtctccaaagtttcacagctagtgtgtgactaaatcttgattccaccctctcaggttttaccataatcccaaaaaaggttgaaacaagaaaagttatctttgggcaattacctctttctgttccttgctttacctactaatgttctaggctcaccctctggtctgcaatctcactgaactgacagatccctcatggcctaaagggttttcacactgggttgactaggctctcccattgcctgtcctactgtctaaggcacctcctgggtagggtgcccagcgtcattctgatgctgcctgactttccttccagctacttttgaaacttggtatccatggcagaggcttaaagggcatgttccaggtacttttatttccaaattccccagtggcatcaaggaaatcagcatctctggatagctctactaaggcttagttctcattgtccaatctagctcctgggtcatgggaggcattcaggaaatatttgagtgtaagagtgagttgctttacctccagaatatccttccaatggctctgaagcaggctgtggagtcctgctggctgatcacagttcacaggtggctcccaaacctgtggtctacatccatcctttgtcagtgtcactgccattgtcccacaaatgtcatttgggcctagcccctgggatagtaatcagtctttacatagatatacattgtgctttacatccacagtaattctgagtggaccttaaaataaattccatgtcaggtctcaccagcccatgggttacagatggggttacctttcagccttgtaaggtgccccgtctttgagtgtagacatggactcacaacgagtccactcctgctgttcctctgctcttgctgaggcttctgctgctgctgctgctgctttgcagaggctggccagctgtggtgcctgaggcacctgtgtcttcacagcaccaacttgcatggtggccacggtgtagttggaaagggatgcttagatgggaggccaatgggagctgcttcaggaggcaaatccaagtcacagagatcgagtcaccgagagcatagtaaactcaaaatcccttcttctgcttaataactgagatgctgtcactgggttaacctcaccaagccttgttttgtcttcacttagagtgatttctgtcttagaaggctcctcatatccttctggggaaggcttctagtgagtccacagatagctggaccaggcatgtccagaaataatctgattctcacatttgagttagccagcgttcccagctatatccccattttgtgtctatataagttaccaaagcccacaaggatattaggtggctccttagtttgctttatgattatgccttgtgtgtgtgtgtgtgtgagtgtgtacgcctatgaggattccttctctcccgttcttgctatggcttctcttccccactgatgggctgtagttccctgtccttttgactttgggcttagtcatgtgacttttttgccaagggaatgtgggcagaagtaactgggagccagtcccaagctaaggccttgggaagcatggtgagcctatgccagctccctcagaactccttcccttggccatgaagagagaataacctggattgtaccttcagcccatgtcctagaatacaaacatggagaataatgaacttgactcaaaggctgaagggcagctgagcccacatgaggtcaattgaactgcagctacctacagacctgaaagtgaaataaacatgtataagtctctgacgtttggggtttgtttacatagcattattgtagcagaaacttaaataatactgggggctaaatatagtggaccagtgacagcacagaatggtaaaatggagtgattgttacttacatcacaacccttcatctctgttgatggacactaaaatcaaagtggcaattactcagagttgggagtcattgagttgcatcattgttgtttagaatcattgacagtttgagctctaagtgattacagagatggtttcctcagctacaggtaaataaacaaaggcacagagaagtaaagtgacttctagagggcttcattgatatttagcagcagaatcagagctaaacaatgagtctctcatctccagcctttctattcttgtttcctaggttgggattttgggaaatagtgcagagagattagcagtagtgacatggaacaatgtgagcctcagcttccatccctgaggctgccttcatctgccagggaaatgtctctgtgtgcagccttgccctctgcacacagtgtgtatggccacctgaataagtgtcctttcatagcgactaatggattgaaatgggtgctagagcagtgcttctaaaaactccatgtattaatcatctaggggtcttaccaaaaacgcatgcagattctgattcagtaggtctggagtggggcttgacattctgcacttgtaacacatggaccacactttgagtagcaatgtattagatcattccagtggaaacatgtatgagtgatggaatgaacagatataattaatccaggtctggtaagtgaggtactgatacatattaagttgaagtgaatttcacatcaaaaataatggttacacagtgacttttactgcccccaaattctttccttttgagtggtttcaaagtgaactgagccagccaggttaagtccctggtttagtgtgtgattagaagatttgatccagctttctcctccttctaattctttaaatatgcaatggccttctagaaacttgtctctcaggctccccatgagccacctgtcttaatatcttcccccccaggacatttcctgggtcaaggaaggaatcagggactaggaaaagtagaaaggttgcctgacagtgagaaactttttgcactcctatttgttcaattctaaaatgtgggtattgttggggcttctaattggaatctaacctgaaattcaggcatgtctagctatatatgaccaagaattaggatgagttcactagaagcctattttcaggagagcggtcagttaaattgaagtttatgggtttatggtaatgggttggggagtttacttcattagcaatagcaacgtttttgaatcagagaagtgattttgaacacactgtacatagttttctcacttagatttatctctgggtcaacccttgttggacctatattagaatcatttagtgaagaaaaggtgggtgtcattaggaaaagagccatttattcaaatgttctgtttgacattagggcactggcaagactacagaatcaatagatatttaaaaacagccaggtgcggtggctcacgcctgtaatcccagcgtgatttgggattactttgggaggctgaagcgggtggattgcctgagctcaggaattcaagaccagcctggtcaacacggtgaaaccctatctctactaaaatacaaaaaattagccgggcatggtggcaggcgcctataatcccagctacttgggaggctgaggcaggagaatcgcttgaacccaggaggcggatgttgtcatgagctgagatcgcgccattgcactcaagccagggcaagaataacaagactctgtctcacaacaaacaagcgaacatacgaaacaaacgtaacatccaaactagcaggtacatgccgtgccagtcatgacccatggtcataagatgtctacagctcaggaagcagctgcacaatgcctgcatagacaaactcttatgaaagcagaatgtcctgatgtctccataacacataacagtgtatgcttttattatggtcatactctagctgtgatgtacctacgctctaatatgccaacgatagttttctttaaatcatcaacataataaatgtcatgctgtcagtcccccacatgtagacataacttagctggtacatggataagaaacctatattagataaccttaggccaggtgtggtggctcatgcctgtaatcccagcactttggggaggccgaagcgggtggatcacgaggtcaggagatcgagaccaccctggctaacacagtgaaaccccgtctctactaaaaatacaaaaaaaaattaaccgggcatggtggcaggcacctgtggtcccagctactcaggaagctgaggcgggagaatggcgtgaacccaggaggcggaggttgcagtaagccgagatcacaccactgcactccagcctgggggacagagcgcaagatttcgtctcccaacccaaaaancnannnnaaatttgcacccaaatctgactaattccagagccaattccaatttagaatcgttatatctccctggtgaactgaagcttttatctttaaggagacacactctttatgtctaccaatgcttattgccttaaagtccactttgtcagatacagctgctttcttttaattagtttttgtgtggtatatctctttccatcctttttctttcagccttctccattcttacattttagatatatttcttttttcttttttttttgagagagagtctcactctctcgcccaggctggagtagtgcaatggcgcgatcttagctcactgcaacctccacctcctgggttcaagcaattctcctgcctcagcctcccaagtagctgggattacaggagcccaccaccaagcccagctaatttgttgtatttttagaagagatgaggtttcgccatgttggccaggctggtctcgaactcctgacctcaggtcatccacccacctcggctttcccaaagtgttggtattacaggcgcgagccaccatgcccagctgattttagctgtatctcaaaaacagcatgggttctgtttgctttccttattcagctttataatgtaaatcatttacatcaaacatctaatacaccatggactgtaaaacacagccatattttatgtatgaattaaaaaaaaaaacaccaccaattagttcctgagacacacaccttaacaatatctctgtgatgtgcataaatcaatcacatcagtttctctgcacctcaaaatttctttcctcaattctcagagatatggcaatttctctggttttacattcccagaagcaaagaaaaagtacacagcttcttcaagtcatgagtagcttcttttttatagctcttggtgtttgcaaaaaagattggaattgcttcactaatactaaattttcattctgctgctctgtttctatgacaagtcagagggcatctttttgaagacattctaaacagcaattaaactcaaaacatgtaatgacaatgacacacaaaactcaactgatgaccaaatgaagagttccagccaagttgacacaagctggctgacagagcttgtaatacacacagcttggcatatgcctcgccatttcagagatgtaaaaataggaataaatgttttcccttaaatcaatgaaatagagcatttggactgaaaatctacgacagttatagtgttttctattcattattctcattctgtttcttctcccccttgctttcttttagtttgaatattttctatcatttcatttttcttcctactagtttgaaacttatgcatttattttctattttttagcacttacctaaaattactctgtaatccatggatccttaatttatttaaaaaactaatgttaatgagtagctttattttcctcccatctaatttaaggcccacagaacaccttcacttacctcaatcctctcccaacttacatgcttttaatgtcatatatgttaataccgtatacttttaaaactttctaaaatagcattattttatagcatgagtgttcatttacatttttgcatatatttagaattttctttgctcttcgtttcttcttctatttatgactcccctctgggatcattttccttctacttgaagtacatagtttagaactgcactattcaatacagtagccactagccatgtgtagctattgaagtttaaactaagtaaaattgagtaatattaaaaactcagttccttcatctcactagccacatttcaagtgctcagcagccacatgtgactaatgactactgtacagcaaacatatagaacatttccatcatggcaaagagctctattgatagtgttcatccagagtttctgttccaggaccaaactgagggttgggctgctatttctcatggcccaataacaagatgcagatgagctggggaggaagagagtttttatttctgcaaccagttacagggagaaggcctggaaatcatcaccaggccaactcaaaattatgacgttttccagagcttatataccttctaagctatatgtctacgtgtaagtgtgcattcacctgaagacgtaagtgattaacttcttttaatctgtaactaaggtctgagtccggaagatcttcccctggagcctcagtaaatttacttaatctaaatgggtccaggtgctggggtaattacccttatcttgtcccctgctaaatcatggaggtttggggaattccctttagagcaccattaacctgtttgttgaaggcctgggaatttcctccaaacccccattaaacctgtttaatcccaaattggttccgttaaaaattccctccttaatttgtccaattttaaaggcccaaaaaaggctggggcaaactcctgaatggcctttgttacattccaacctttgtttaaaaacaccggtttttaatatttaacttaaccatttaatctctactgaaacacttgttatataaatctgcattaatgagaactggcctgcgccatatctccttctcagaatatcttagggttgtgatcccctgtgtgaagagaatatatctctggagatctcaatctctctaccccaaaaaaaatctcactcggagaaaactcagactcttatctccacagcgctatctctctcctctccgcttgtctaagatggtgctccttgttgctgtgcctgctttcatcctgggatctcccttcaccatcaggattgccttcacctcattccagtcttggatctttcttcttgtttcttgagtattttttttttttttttgctgcattcccttcagtggcctcttgggaaaagatgtgtagggagaaaaattttctttagaaacttgcatatctgacaatatatttatcctatcctgacatttggtagatagttcagctgggtacagaattctaattaattttccttcctgatttataagacattgctccattttcttctggcttccaatattgctgctgagaagtctgacaccattcaaatgcctgattttttccatgtgattgttgttttctgtctggagtgttgtaggattgcctctttatctacagtgttctgaaatttcatgacgtaggtctttcttcattcattatggtagacactcagtgggccatttaatcgggaaaaacatgtgttcttcaagttctacaaactttattacttcctttttcttgtgtctttctctggtctgttttcagccccgagtctcttagatctgtcctctaatattcctattgactttacttcattttctaagtctttatccttttgctttactttccgagagacctgcttaaccttatctcccaactcttttattgaatttcatttcttttactatatattttttactttgaatacacctctctcttcctcacattttcccccatagtattttgtcttcaattgacagttctactatcttattactctggagatattaataatagtttttaaatttttatttatttttattttcaaaacagtgtcttactctgtcactcaggctggagtgcagtggtgtgatcatggatcactgcagccttgatctctgagctcaagctatcctcctgcttcagcctcccaagtagctggaaccacaggcatgtgtcaccatacccagctaatttttttgtttttgaggtggagtctcactctgtagcccggtctggagtgcagtggtgcaatctgggctcacagcaacctctgcctcctgggtcctggttcaagcaattctcctgcctcagcctcctgagtagctgggattacagaaacacactaccatgcccagctaatttttgtatttttgtagagacaggtttcaccatgttgggcagcctgggtctgaactcctgacttgtgatctgcccacttgggctccccaaagtgttgggattacaggcgtgagccactgcacccggccactaatttttaaattgttaataaagacgaggtcttgctatgttgcccagtatggtcttgaactcgtgggcttaagtaatcttctgcctcagcctcccaaagtgttgggattacaggtgtgagccactgaatctgacattttttaaaagttttcttctctttaccaagtcttttttcccctttctgcttttttgggttgttttattttgatctctatcttgctagaaactttctgcagacgtttagtaatactagatttttgagagtgggcaactggaaagctgattggaaactctgaatacatgggtgaggcttgttggctgtgagtgtcattgcttgatgtcctggcaaggccaatgggtttgggacccctactattagtataggcctgattccctgggaaaggctcttttgatctcctgcctggaggataaaggcctggctaccagccttctgtgtgtaatgtgagggagaagggctggagtattcaacatcatgctgaatcctttcaatgatcatcttgtttttagtaatctcctaccttaactctctgtcttctgctagtatgggaaagatgacctgaaaatctaaccatttatttttcccccattaatatcattttatgattattcagaagttaaataattgtcatgctgtcctccaaaaagactgaatcaactagcaacaaataagaattttctcacagctctgccagcattttaaaagaatagctttattgagcccaggaggtcaaggctgcagtgagctgtgattacaccactctaccccagcctgggtgacagagcaaaaccctgtctcaaaaaagaaatttaaggaacagctttattgttgtaaaatagacatacaataaacagagcacatatttaaattgtgcaacttatactttgatataaccctgtgaaaacatcaccacaatcaagatagtgaatatatttatcacctcctgatacagtttagctctgtgtccccacctaagtctcatgttgaattgtaatccccaatgctgggggaggggctttgtgggaggtgattgaattgtgggggtgcacttcccccttgctgttcttgagatagtgaatgagctctcatgagctccccttcactcactctctttcctgctgccatgtgaggatgtgcttgcctcttctttgcccttctgccatgatgtgtttcctgagtcctccctaaccatgcctcctgtacagcttgcagaactgtgagtcagttaaatctcttttcttcataaattacccagtctcaggtggctctttatagcagtgtgaaaaggaactaatatacctcctaagttacctcaagcttcttcttaattccttctcctcccttccttcattgccaagcaaacaaccacctgttttctgtcactatagattagtttacattttgtgggttttttttttttttgagacaaggtctcactctgttgcccaggatggagtgcagtggtgcgatcatagctcattgcagccttgaactcctagtttcaagtggtcctcccacttcagcctcctgagtacctgggactacaggggtacaccaccacaactggcttaaaaaattttttaaataaaaatggggtcttgttatgtttctcaggctggtctcgaactcctcgcctcaagcagccctccctccttggcctcccaaattgttgggattacaggcatgagtcatgactcctggcctagtttacattttctagagttttgtataaatggaaacatacagaatgtatttttttgcggagtgggggagtgtttctatttctttctttcttttttctttttttttttttttttttgagacggagtctcgctctgtctgttgcccaggctggagtgcagtggtgcgatctcggctcaccgcaagctccacctcccgggttcaagcaattctcctgcctcagcctcctgagtagctgggactacaggcgcccgccaccacacctggctaattttttttgtatttttggtagagacggggtttcaccatgttagccaggatggtctcgatctcctgacctcgtgatctgcccgcttcggcctccctaagtgctgggattacaggcgtgagccaccgtgcccggcccaagtgtttctatttcttaaccagctttcatgcaatctttttttattttaccatctctgtgatcccactcccaaaggtactagatgtcgattggtccttaggatcagctaccatttgcccaactgctttccagccttccaaaaatttttttctttttttcttaaagatactcctgtgtgaggctcagaactcttgaattgctactgcaaatatgaactcggtgatgtgaatgccagggaattgcctgattgatcaaagaaatgtatccccttctccctcactcttgctgtcttctcatttgttttccccatccttgtggattcgtgaatttaaatatccctttaatgttataatattttaatggcgtttggcgaaaagtacagaattaggtgcaagagtgcatagctgttattttttttttggcctctgagactgttcatatatgcaagttatttaacagaaagttctgcagtgacctgagatgtcaggggggtctgatagagtacgtttgaaggcagttactggaaaaaaataatgccatttctggtttgtacttcggtaagttcagatgacccaatatattgtttacatgtggcattcagtaaaaaagtagcttcccctccctttcttcttccttttctcctttcctgcttctataaagcatctgctttgggaaacttcttaggaggagagcttgccagcccgtgggtaatggagaggtcttgcagagataaaagagatgctcccactcaatgcaggatggtgtggaggtaaatggggatacgtctggcatcactcaggaatgggccttcctggcagggaagagaagggaggggaaagaggaagggagtcaaagatgaattgctgaatacggggattccagggcctggagccaggaagagaactttgggaggtgtgaacctggagggcatcagctgatgaggagcagcctgaagtccggggaggacctgtttttggtggccaggaagaaagtgccttccacacacagggaggccacaaggctgatgggctgggggttggaaggacagccctaggacaggcttgggaagcaggctcaggtagggactgcgaggttcttgttgagtctttttcattcctggtcttagaaaatagaatccaaggcctcttgagagtggaaggtgggttgggaggagggcagatggggcttaggcccaggacacccgtagagctactgcccagctgtctctcagggactctgctgaggtcactccaaggatcattcttagccttgctagacagtactgacagagggaaccgtagtatcgcacccacttccttctctttcaatgaaagtttaaaggtcaccatttcctctggcaaaggaagttccacaaatattccatttccggtcttagaaacagcaaggtatcaagcaattgcaaacttcctgtgctggggaattcccaaggaagtaggggcagagttctggtggagacaaagtgaattccgagtgattagtcagtagcagtagcagtagcagtagcagtagcagtagcagtagcagtagcagtagcagtagcagtagcagtagcagcagcagaaccagaatttccccgcacgtgtctcaggctctcatttgccaactcagtctctaagtatttttattggcaggaaaaataaaatagctatgagtgaaataattcattagacctgagcctccatcaattttgtgtttaaaggcctgactctctttacctttccctgggatggaagatgcaaatgttcctgatgtcactgtcaaaaaagaagaaccagtgggtatattgtatgcttgagttccagccatttgtcacaatagatagagatgactgccatgtgtgtagactttctatagactgtgtgctaaacccgacctgccacttccaaggagtagatgaggaatgtccatggttctggggagccctaccccaatttggggcagacattccaaagctcattttctgtggagggggttgatggttaaaggacggcctgggagtaactcgtctgtactagggcccaggagagttacatgctgcttcccatgttattcatcattcccccatgtgaatagctatggcgtgaggtccaaggttagggcctttctaccataaatgggggaataaaattcccctaccagcctgagaagtttctgttataaagaggctttttttttgcgggggtgggggagcaagccgactaatgtgttatttccatacggtttgttttaaaatgtagatgtcatatgcaggagaggtggtgtagtgagtcacaacgggattagaaggaccagtccgaaaagcagaagagggtcaagttcagggcactgaggactactgcattcagtggcgtgaaaggcagatggctgaacaggagggggacattacattgcttgttctccttgagcctcgatttcctcatctaaaaagagggtcatttattcacagaacatttattaaacttgtgccaggcaccgtgccaggagctggactaaaaattaaatccacccctgtgagctgctctgaaggctaaaatatgaagtatgtaaaagtaaccaagtgctgtacacatgcagctattcaatgactgtgtgggcattgcggcagattttaattttcttttttatttctttctctttagtgagaggtgttggttgttattattgtcgtcgctgtaactgtctatttcacttgcttttttgttgcctccagcccattccagggctgtcatctaagacacttcttatcacctaaataaccggggaggcaaagcgctttcttaagagatggatccagaagaacaatgctggttttctgtagaaaaaggggctgtgggaagtagagataagaagggaattggccaagatgaatgtacagagccttattttttttttataacacagcaagattagatacaaaacaggacaatagcatcatctgtttttataactggaaaggacctcactttacaggtggggaagaatagagtggagaagtgaagagaatggtcacagagtcaatcagcatgtctgcgtcaaagctgggattcccaattcagggctcttactacagtgacgtatggctaatattttggcattgtttcggggaaaagctgaagccctgatggtgtacgtcactcttgagatagtctgtagtccagcagggaggaaagcaaggaagggaggtggaggcagcatttttgggtgtaacatttcgttcttgttttgtggccaaatcatagtgtgattgggacaagccactgcctttctctgagcctccactttctttttcttcttaagagggagggaatagtagagtaaaagtagtcattttatcaaacacctgctattttggagccatattgcaagtgggttgggggttgaacacttggctttattacccataggattaaatccaacctcgatactgtggcattcccaaactccagtctaatcttcttctccatcagccatgccccacgacaccctggtcatatctgatgttgccccttgcacttgccccctccttatctttgctttctgacctaccatatggctattggttgaaattctcattttccagggccttgcttaaatatcatctcatccattaaaactttcttgaacctccccttgccctgttcctccctaatgtctcaagccagaatttatttccttttgtggccaagggactgggtttgtgacctctctcacgagacttaatattgagaccaaacgtctttagacctcaccagccagagagatgagcatctatggaatgcaggcttttgcctggacttgctgatgcagggcctctgccttcctccagggcctctcctgctgttttaggaatttccctcatggcacagtccatgagctcagggtcaagttcatacatgtttttacttcttctactctgcaaatggtcttcttgaactctgagggtcctaaagctgctctgcagtttgtggggtgagtagaaaggggctttcaaaagttgtgctgttgtttcccaccccaatagcatgaaacacaaagatgcttacaaatagctgccttgctttctagtcccaacttctctctcctgaggctttaaaacaagtcccctaggttgagctggactggagttgtatcctatcttcattatctgtctactctctttctgctctctagagaagatattatatatgtgtgtatgtatgtgtaaatatataatatccatatatagaacatatattgttatatttacatatacatacataacatatgcatgtattcatatatacatatgtagtatcaaagttggaattaaactgtatattttgtaatttgcttttatttgcatctatcactgtaaaatgaatatttatccataccgtaagatattcttcaatgtattttttttttttttgaaacagggtcttgctttgttgcccaggctggagtgcaatgacccgatcttgggtcactgcagccttgacctccccggctcaagtgatcttcccaccttagccctctgagtagctgggactaaaggtgtgtgcctccacacccagctttttaattttttttgtattttttttttaaagacagggttttgccacattgcccaagctggtcttgagctcctgggtccaagcaatcctcccactttggcctcccaaagtgctaagattacaagcatgagccaccacacctggcctcaatgtaatttttaatggctgtatagtattccatcatgtggttgtacccaaaattatttaaccagtccccagtttatttcaatttttttttactattttgaataatgttttagtaaatacccacaaaatatgtacaatggctgggcttagtggctcacccctgtaatcccaacactttgggagtctgaggcaggtgggtcacctgaggtcaggagttcgagaccatcttggttaacatggtgaaaccccgtctctaccaaaaatacaaaaattagccgggtgtggtggcacacacctgtaatcgcagctacttgggaggctgaagtaggaaaatcacttgaacctaggaggcggaggttgcagtgagccgagatcacactactgtactccagcatgggcaacagtgagactccatctcaaaaaaaaaaaaaaaaaaaaaaaagtacaatttgttgtacctccctgattatttcttttaagtagaattttcttataattttttttataagtaaaattttgaatcaagggagaagcacctggagtccttcagatacctattgccaaactgaacttttctgttccaggtttactacattcagcctgactcagggtttggggagtagaggagggggtggaggcagagggcctctccctgtccccacagacctcccttggtgaggtccaagtctggacaggtggagtgtggcattgcaccgtcaggtcctgcttcctgtaattcccctaaatccatccagtggagcctcattgttcaagtcttttttttttttttttttttttaactcccctgaagacggagtctcactctgtcgcccaggctggagtgcagtggcacgatcttgactcatttcaacctctgcctcccaggttcaagtaattctcctgcctcagcctcctgagtagctggcactacaggcgtgtaccatcacgcccggctaatttttttttgtatttttagtagagacggggtttcaccatgttggccaggctggtctcgaactcctaaccttgtgatctacccgcctctgcctcccaaagtgctgggcttacaggtgtgagccaccaggcctggcctcaagtctattttttaactccaggaggcctggtattcagagggattagggctggcagaagggcctcaaagctttcaaggcctggggaataggctgcagcctggttcagggtaacccaagtgattttggttccaaagggacaggaaaaaaagtgattgatatggaagttgtcaaagtgcaactgtcaagacattaaaaaatgtaacccttttactaatatacagtagacttgtgttaaatatttaactgattgtaaaaggaaaaaaccagacgcagttttccctaccatactgtcacaacacctcaacactgagttcttctgtgacctctagtcaccgaaatgcttggggatttctcccaccactagtcctccagcagccgacaccagttgggtgtcctaattcactccaacactatctacctggagttagcgttagatcccacaggttgagggctcagtctcacaagactgcctcccacttcaggtgccagttacaagtggtaggttgtcacctatgcttctgactgatggctataaatctgggtttgcttccctcgggttccgtgaatttgctagagcagctcacagaactcaggaaaacacttaagtttaccagtttattctaaaagatattacaaaggatacagatgaacaccagatgaagagatgcgcagagcaaagcatgtgagaaggggtgtggagcttccatgcccctctggggcaccaccctccaggaaccttcatgtgtccagctatctgggagcccttccaaaccctgtcctttttgggtttttaagagtggctttattacatacacatgattgaccgaaccattggccattggtgactgacacaaccttcagcccctccactccctccagtggttggggagtggggctaacagtctcaagtctccaatcctgccttggtctttcctgtgacaaaccccatcatgaagctactgcattggggctgccagccagcagtcatctattagcatgcaaaagacactcttattattccagagattccaagggtttttaaaagctgtatgtcaggaaacaggagatgaagaacaaatatatatttcacaacatcacactcgttgggggaattgacaggatagcaaaactgattaaaggaggataggagagactgagatatatatttccatatatatatatagagagagagagagatatttccatatatatatatagatctagagagagagagagatagagagagaagagtctttccacacatttgggggagcagttccggaggtacagcccggacaggagatgtgagaagatcgtggttantgttcccctggtccagaacccctccaagtgggcttaagtaggaagggtggtgagcggcaggtaaacacacgtcaaaggcagtcttcctctctgagggaaaacacttgtataagcattgcaatcaatgggcctctttaattatgtgccagtggcaagagcgggtgctgaacccaggggcctgcctcaatccggggcctttgaggcagaataaagtggtctcaggttgttggcatttccttgcccttccacccgaagcagacacaaatcctctctggaggcaagttccccaattcagccagtacaactcccacagactaagatcaatcatgtacaagctcacagacaaaggtcaccaaacacacagagcaataaacaaattcatgagtgacgtgaatgagaataaacagaaacaataaccaccagctgggatgctctaagtcttcagctgttagaattcctgaatatagaataaaactgccacaatggcaaacatgcatctagtacttactgtgtgctgggttctaagaattttgcacattgtgccagataccgactcagcttcacactcaccctcctactgtgccctcttaatttgcactagattaaaaggtagaaaggaagaggcagctattctgttcttggctgtgcctctggcagcacatgcaaaatgggcagtaacagtggcagtcacaggtaagtagccttctcacagtgtggagttaaaggcatgggactgagacgagcaaggttcctaaagggacagtggccagtaaatgaccaggggctactggagtggctgcatggctctgtggaagctcagaggagccttgggtcctgcaggtgcagtagcagctttctgtagttcctgatctctgggtcccacaatcttccccgtttttgctcctccacttctaattttgtaactgacttccctgtgtgtacttctctctctgattgaaatagccagactggtttctgtttcctgataagacattgtctggtacgaacacagtaactcatttaatccgatatctctatgaaggaggtacaataattattcctattttacagatgaggaaacacagcagaaaaataaagtcaattgtctaaggttgcacatttagtcaagggaagggttgatataacatataattatttagaaaacatctaaggaaataaaaggcataatttaaaaataaaactaggcaggtttaaaaaaatgaagtaatctataagtaaaaaagtataattgttgaaatacatatcttagtggatgggttaaatagctgaagaaatgattaatgaactggaaggtagttctgaggaaatcagaattcagcatagatagaaaaaatgggaatttacaaaagtacacaggaattataaaagaggttaaattatagggagggtagaatgagaattaacattggtctaactggaattttggaagaagagaatagagagaatgaacaaggcaatatttaaagaggtggctgagaatttttcagaaccaacacaaactatgactttaccagtagagaaaacaatgtacactgaggaggataaataaatatactatgaacaaattgtaataataatactcaacaaagacaaagagaagatcttaaaatcagcaaaaaaagaaagtcagacttagaaagaaatgacaatggcagactactcaacaacaacaatggaaaccaaattcagtgaaacagtattttcaaaatgcatatttaatctatctttgaagaataagggtgaaaagggtgaaaattgctgccttatacaaaatatcaacattaacaaaaagtaatgaaggtaatataaaaatgttttcaaataaacaaaactgagagagtttaccaccaacaagcattcattaaatggacttttaaatgcagtttttaggaagaaggaaaacaattcctaaggaaggtctgagatgcaaaaaggaattatgaacaaagaaattgttaaaattataggtgaattaaaaaaactgcctgcataaatgataataatgacaatgatgctattaataatgagttgataaggataaagaaaaggacagaattaaaatactagaaaacaagcatgctggaaaggattcaggaattacttgaaggttaaagttctagggtccttctatccttctagaggggagtcaatatattaatttttgaccgtcacttacacagtgaaaaactttaaggataaccataaaaaaatagaaatagagagtataacttctgaaacagtcaagggaaaaatatggaataagaaaactgaccaaaaaacatctcagtcaatcaaaaaaaaaaaaaaaaagaaagaaaaggttcggaaggagaaaatcaaagcatagaaaaagcgggacaaatagaagtggaaaagaaaaaggtagaagaaacaggtccagaaatatcactgatgcactaaatcaccattaaaagatgaaaacaaatgaacaacatcaaaaaattctagtgactgtagtagtgctgatcagaataggctctaagataagatgcattattgtgagtcaacttgtgatgatgaaaggtttaattcaccagaaagacacaattataaacttgtaatcaaatagttttattttatttactttatttatttattttttttgagacaggatcttgttctgttgctcaggctggagtgcagtggcttgatctcagctcactgcagcctccacctcttgaggctcaagctttcttcctgccttagcctcatgagtagctgggtccacaggcacacaccaccaagccctgctaatttttgtattttttgtagagatggggtttcaccatgttaccaggctggtctcaaactcctgggctcaagcgatctgcccccctcggcttcccaaagtgttgggattataggcgtgagccacggtgcctggcctcaaataactatttaagtgaaacaaaactagtatggcactaatgaaaaatgtataaatccataatcgcagagggatttcaacttacttctttcgattatgtaaaggtcaaacagacaaaagacaatgacaaaacttaatgcaatgaacacttttgatttaatgaacatatattggatatgtacccaagaattagagaatacatactagttttgagtttatgcagaacatttacaaaaatttagtggaagcctaaattataaaaagttgctgtcacgtagaataacacacaaacccctgagtccggaattcaaagccctccacactctcctctacctttgcatctttatcctccaccacactgcagtgcatactctgggctactactcactgttcttgattcaaattccatgttctgtcagctcaaatcattctctctgcctggaataactacttcatacatattctgctattgaattcttgtcttagcaccccatctactccaagacgatgtccagttggggttactccctgtcccattttctttgattacactttttttttctacttccattatattattgatcacatctgtgccacagtttttgactttgtgtctgcttttactcttttctagaccctgagagctcctgaagggttgggtcatttcttttttatttgctcattcctcatggcacagtgagtgcttaataaatggctattgactgaaattaaactgtatctaaatggacatattccacttctgggccattcattctttctttctattggaaccaggagatggggaaccataacaaaggtaaggttgtgccatgtgaaagaacatggaaccttcccctgagggccaaaaaagagcagggaaaggtgcaaagacaaaatcttccatttttaaacaatgtaagaatgtggtccacctcatgctcaggtgggactttatcatgacgttatttttggggacttatagctgcatcatttaccccatatacatttacctttagtgtagggaactgaggacaggaattttgttgatgcagactcttgctaatgaggctaacacttggagaatttttatcatgcattcaagaagcttgttttacatttcttcattaatactttagttggtggtttagctttagttgtaggcttatcagatatttggagatatcttcataaacgatggctttggttttagaagagttattctgaagctactatttctggcaataatcaaacagcatggccatttgttttgtaaggcctttcctaaaatatgacggtaaaatctacgtgtggaaaaatgcttattcttctgtcctctataaatgtgaatctagtttgtcttcaaaatgaaatcaagtgattaaaatgtagttttctaagaagataaatggagcaaagcactctgtgtttcacagtgttggaaatcactcatccctcataaaactgtcccaactgatcctgactcacatgaatgaattaaaataagagttaataacatcaatttacatttttaaagacactttcccatgttttagactattggttggaaaagctggtaggtgtacaatttgtggagagttggctgtttttgtctgtcgttgtttgacgtatttcaaagccatatctaattttgttgcagaatggtctgaattctacaaaaatgttgagttgtgtagtgtggagaagtacggagccatttactgaaaggctggggggaaatgacgagaccctgagataaggcagtagtggtgcgaacagagtggaagggaggtagttgagatatgttcagagtagaatcagaatggacatagtgaacaactggatgcaggtgggggctgaggaagcaaagttgaggataattctgagacttctaggttgatccactgaagttacattattcaacaccacaaggaaactaggggaatgagaaggcatactggtttgctttggagtggaagggcagtgatgtaagaggagttaatgagttaaagtttggatatgcctgaacttcaatttgatatgtgcatctgatatacccttggggtgaccctccaggcaatggttgaacatgtgtatttcttagtaactgataggcatcacagactcacatcagtaaggaagcaacagcaaacttgattggacgatatacctggaactcagtaccctatgactggagcaagtctctgtcagtgaaatgaggataagaagaatcttgaccttgtggaatatgttgttaggaatatatgtgatgaacaacataggatacttcctacagggctccacatgtagtaagggctttataaatgcttgataaatattattgttgtaatttatttccaaagtaagatgccactggaggaatctttggaacccaaattaataacaaataggactggatgcaatggctcacacctgtaatcccagcactttggaaggccaaggcaggaggatctcttgagcccagaaattcaagaccagcctgggtgacacagggagaccttgtatctatgaagaattaaaaaaaattaaccagatgtggtggtgcacgcctatagtccctgctgcttgagaggctgaggtgggaggattgcttgagcccatgaggttgaggctgcagtgagccataattgtgccaccacactccagactgggtgacagagtgagaccctatctcaaataaataaataaataaataaataaataagtacaaaccagcaaacactaatcctttctagagattattgaactctggagggcagatctgaatggagccagcagagggacctatggagatcagcctggccctggacagcaccaggcaatggggttgctagagaggtaatggggttgaacagggtttaagccatgaggtctcaagaatccgtgaagactcagactaatttttttttttttgcatgaggattaggtgttcctaggaatttcaatgagagcagggttaatgaaggaatgcagggtaggagagctgagggaaggcatctgagagagcctggcttatgaatggctgcgtcagtatggctcacctgctttccttgtatctacttagcagatgatcccaccccaggcctccagggccaaggtcatttccacatagtcatgggcccttgagggcctggagcagtgtaaggaagacagagtcttaagaaattgcattaacagtcatggtgcttggcaagtgtcgtcatcctatgccaagcctgatctgaaggggtgcatgctcataggtagctgctgcccaagattacagcagcttcttcaatcccagatccatgctctcctatattcatttttccaggggttcctgtccttcgacagtgatgagatgcagaatgacttattgagttattctcctgatagttgccaacttttccaaatgacaatggggcatggagcttgagagtggaaatgaggccctagggatagcgtgcttaggaaaacactcccagcctgatgtaattctgggggtacaatggcattttcatcatcaagactgatgtaaagggtgactagcagtgagttgggggtgactcgcactggggctaggtttctgattctgcctaatccagacagagcagaagcactagtgggctggtagagggcctccagggcctcacttaatgtcctggaaaaacagctccagattgttggttcacgttctgaggacaagcttgggtactacaggatagagagagtggtgggagatgccgtggcctgccctgctgatgcctgccctgccattcctgcgtgtgatgtctctggggcatcttgccttccctgcccagacctgtagttcagctgagggcatgtggaggccaaatggcttcttagagtgttactttccttgaacagctctgctgggagaactggaggagctagctagtcacggtaactgcagcagtcaaaggatcgtcccggtggaggtggggtggaaaggtagagaaagagaacatatagcgttttccttggagatgtgtgggcatgtcatagaggaaatacccaattcctgagccttgagccctccaggaaaccttggaatattaggttagtcatccccaaggaagtctaagaattctggtctcacccatctcctttaattcccacaatgatcctacatgatattaaggaacacgggccagtaaccctccaagcaatggatgtggtggtgaagtttgacctcatgatggagcggaggttggtttgaaacctaagaatttaatttattgtttcaaactgttctccactcagcgttattaaagcatacataattgacacataaaaattgtatatgtctacggtgtacaatgtgatgtttcgatctatgtatacattgtgaaatgattacaacaagctaaataacatacccattcatcgtgtttcaaaggaattaaactcaagcacaaaagagaggtgctgttgaagagtagggctgctctatctaagtagtatgtctggggttgtcctggatcagggtccttttgtgctagtaataaaccagcccttctggggctgctccactttccccacattttcttctggagcctccctaagaattaggacatggccactttctctgcataggcttcctacttcaacaaggacagggcttgtgctgccccatgccacttgagtgtccctacagcacagagctgagtgcacactggctgagtgaggaaatcccccagattaatcttggttctaagcatcatggctgtatttcacacgtatatgaattacaaattacagcatagtcgaataaggatttttgtgctacaactggaatcccagattatgcaaattggatagtataatattgaaattcctaggactttttattagttttaaaaaattatacaagcttagagtaagaaattaaacagtgcaaaagaattcactgtgaaaagtaaaatgctctgtctctgctgagagacagatattgcagcccagatactactggggtcaatagtttcctttaagcatgccattttgatggtttatgggacttacagctcaagaagcttgacactagggttgatctcagaaaatcattgttgcaggtattagatatgaccgtctcataaagatacacacacagacacagcgattggagatattcactggggcttatgggctgcttgtcctttctgctctgtgcctaagttgggctcagagtagcctggcatcggctgtggggagaatgctggcatggggttagcaggagcccacttaacatgtcctaagccacctggaagagtccttcaaggagaccagactccagaggccctaaggaaggaaggacttttgcccgtttttaggtattctagtcccagagtttagggaggaatggtttggctttgggtcgtgtgcccctttaccgagtgggatgggatgtgcccatgagctgttgagctggctcttggagaagacagcaaaagcgggaataagaggtcaggaagctgtgtggttgtaggaaatcccagcagagggcctgggggtcaaaagtggtcatggtagtgacggtggaggctgaggtggtagaaaatcagaggacaaaccccatgggctgctggtgatctgaccgagctcctatgctctcctggttcattttaggctctgtagcagcagatgattggctggtgtgagagcagtgcacctgccatatcaggcaatccaagacaagtccaagctacgctgggaggaaacctgaaggcagcagcaggtagactggctgaagacagacaggcaggcaacttgtcaatcagatttgtgtttttaaggacttttaactggggagccctccatgacagatcagatgagagaggaatctgggtccgcccatgtgtcaagctaccagagggtcccatcggtgcttggatcttctttgaagctgggtctgaggtttgcaggtagagggtgagctggtcagagggacctattgcagagctaaccaacaccttcccaggaatgcaagcacaagcaccccaccgcgggcaggcgggcaggcacttctccttttgccaccaggacctcacagaggctgatctggctctgtgaggtgggaaaatgggttgtacttagtacatagagataaaaggcttaggaggcccctccatcctgtgaccctgtccccagaccacaggtgccggcaggtgctgctatttcaaggctgggcctcagtgcaagcttgtggtttcttgcccacctgtgatgtcctcccactaatgaaggggctctccatcctctgtctgcctctagcaagtggaggctctgggccctgggcaagacacagggggaaatgccatctgttatccaaatatatttcaatgtgacaggaaagctgtctttagagcacagcgcatgtgctctacattgatcccaggagtttgagacaacattgcaagactgggcaacaagcaagactctgtctctacaaaaaataaaaaaaattagttgggcatggtggtacatgcctgtggtcccagctactcctaagttgaagagggagaattgcttgaggccaggagttcaaggctgcagtgagctatgatcacaccactgcactctancctgggtgacagagcaagaccctgtctctaaaataataatcgtaatacattttttttaaagtaaaacaaaaaaaggtcacactttctcataccaaaataaattccaaataaattaaaggcttaaacatgagaaagttaaaccataaaattactagaagaaaataaaagcaaatatttagataatcctggggataaatttctttggaatgaatttccttaagatgaatctctaaaagtgaaattcagggttcaaaggtcttttctttgtccttttcttttccctttccctctccctttttctttctttctctttctttctttctttctttctttctttctttctttctttatctttcttccttccttccttccttccttccttcctttcctgcttgcttgctttctttctttccttccttccttctttctctccctttctttctctttctttctctttctttctttctttctttctttctttctttctttctttctttctttctactttctttcttctctttccttccttccatctttctttctttctttctttcttttctttctctctttctctctctctctctctctttctttttttttctggtgagacagggtctcattctgtcactcagactggagaacagtcgcatgaacatggctcacagcagccttgacctcctgggttcaagcaattctcctgcctcagtctctcaagtagctgagaccacaggcacccaccaccaaacctggctaatttttgtatttttagtagagatggggtttcaccacattggccaggctggtcttgaactcctgacctcaggtgatctgcctgccttggccttctgaagtgctgggattacaggctgggcctctacgcccggccgagactacctctcttttaactggatctctgagctctgggcagagcccaccctgaatcctggtctccaaaaagggaaaattattaggaggctagaccatatgatgcttttacagtgcacttaaaaaaaagtttgttttttttttaaaagacatttctacatgtctaaactacaatcttccttgaaaacccaagagtagcttctgttgcaatagctagtcaaaaatataatagtcaaaaaaatcaggtaacacaacacaaacgcaagcagtttaagagctgaaatgaacttgtctgtttacactctagggattccataaggaaaaatagaagtttctccctaaaagggagcctggcaccttctccattttctttaaggaaccccaggctattataaactattttagggctctcatgcagcagacggtgcaagagaaaggagagacagcagaagtaaatgaagaaaacagaatccagtcaacagagaagaaaaaaacttttgctcaaaaaaaggcaagttcctaggaaagaaaaaaaaaacatgagggctatttaaatacaaagacgcatacatacacatgcacacatcttggatgttagcttttaattaagctgacttttaactattgaggtcctttaaaataaatcttttaaaatcttattacgatatttcagctaggacaaattgctgctatttcagcattaccaagtatcaaaccagaaaaggcttgatttaggaaccaaacccaggctgtcgtggtaggaaaaaaggcagaacgttagctatggaacccacagcatggggcaacagccattgctctttcagtatggcctggctagcaaaaaggtggccttgttatgtaaataaagcccgtttggtggtcaaaatgaaacatcttttcctttttttttttcttttgctggccgttttttcccccaccataccacgtttgtgtgtgtgggagggtgggaatttagccacttcagaggcctcattccccataatttggaaatttcctttggatttgatcaagtcagatagagtaggtcaaacccaatgggaaaaagactgaaacagcaataaaaacagaaacaaacagttaagcaaaatgaatgatcacacaacttatatgattactgagtgctctaatggtaaggagaaattaagaccagctggttgttaaactttagccaagacaaaaccccaattcagctacttacctagggttgggtctcaggctgaagaccgctcactaccgttctagaagcaagaaataaaacttgaactcgtcttacctgtgtagcaggacaagccgcagacaaaatccctcagacaccaaattaaagaaggaagggctttattgggcctggagctgcggcaagactcacgtctccaacaaccgagctccccgagtgtgcaattcctgtcccttttaagggctcacaactctaaggcggtccacatgagagagtcgtgatagattgagcaagcagggggtatgtgactgggggctgcatgcacctgtagttagaatggaacagaacatgacagggatcttcacagtgcttttcttatgcaaataaccgattagatcaggggtcgatctttaccaggcccagggtgtgtcaccgggctgtctgcttgtggatttcatttctgccttttagttattacttctttctttggaggcagaaattgggcataagacaatatgaggggtggtctcctctcttacctgcggggagtgagctcaaactccttaaaggagttacctgccttccatcatcagggaagcaggaaatcttgccttccttgttggaagcaagtaaaactcaaaacaaacaaagaaaaaaacagggagttgtacagcaaaataaacttttgattttgaccaaattttgggagatcaggaattctctgaaggagatgctttcagacctcagcaaattgtcctgttggtttgagccataaagttagctcatgctggtaccaaacaccagtaggagatttgtcaaaggtaagaggcatctccactcagaatcccttcgtggttaccaacatgtgaaccttggaaatctgagacaggtctcagttaatttagaaagtttattttgccacggttgaggacacccacccatgacagagcatcaggaggtcctgaccacatgtgctcagggtggtctgagcacagcttggttttacacattttagggagacatgagacatcagtgaatatatgtaagatgtacactggttccctccagaaaggcagaacaacttgaagcagggagggagcttccaggtcacaggtaggtgagagacaaacaattgcattcttctgagtgtctgattagcctttccaaaggaggcaatcagatatgcatttatcacagtgagcagaggggtgactttgaatagaatgggaggcaggtttgccctaagcagttcccagcttgacttttccctttagcttagtgatttggaggccccaagatttattttccttctacatcactgtgggcagctgactaggaaagctttgtaggactggtgggcagtgtgagagcccagtggggggtggtggtcctgtgccaatggtagcaaccacctgtgaggctgagtaaactcatttcccaacctcctctagcagccccagtggagatacagatgaagcagactagcgatacaacccagcctgaagttttgtctggtgagtgtaatggaataaaaatgggaagggtgctgaagagaccagcaagaaaatggttgaagagatggggcacagaaattaagctggatcaaaaaggacggaaaagcagaaagggccgatagagagaggggatatctatgggttcgcgattctgaaaaggacaaatcactggtgctttgagaagagagagggtgagaaagcaggaaggctggaggctgtcatccaagaggcggacatctgtgaacatgattccaagagtcaccagaccatgggggtggccaaagggagtgcctcttctcacctcctactcttaattccttgtactcaagataataagttcccagaagagaagtacccatatttaattcatctgtgtcttcctagcagtactaaaaatattatatgaaaggtatcaaacctttgagaatgtgtgctgctaaattgttaaggatgctggaaaactcaagacgtccctgatcctgagcctgagtatgagcctgtggtgagcccaatgcaggtctccattcagacaaaggcctcagggaacggatgagacctagggacagagatgcatgctggagcagcattccccatccctactgcagctcaggccagctgactgctttatgagtaaacgttaccagggaacactttgcagtcttaacacacatgcccacctgtgaccactgatccctgttgggtgaccactgacatcagagattcgatggcagcaatgaagacaaggctatcctcattaggaaggaaaggaaggaggagggaggagggcaaacgaatctttcctgcttgtcaaccacgtccatctctgttaggtgatttcccatgtgtgactttgtttatctttataataactctgagaggtaggtcttgatgtccacattttgaacatgaggacatccagccaggaagttgagttctggggacatagctgagagggcaaagctacatataaacccctctttgttttttctggcttatccactgagtgccccctgcaatccaccagcccatttgtgaagtgcatactataggtaagttggcacaggaggagtggatgtgggcgattttgtcacagctctccaggaacttacacactggtgaggagggccaggtatgttcctgaccagtcacaatcaaagcaacctcctactaatcagggaggcttggtacctggggaatgctatgttgaaaggttcttttctgggttttaaaatgatgggtctatttccttattcttaagattgctttttttctggctagaacttaaaagaaattttcagtaaaatttcccttccctggcacaaagtgagcttgaaatgaattcccaggtggccttgatactttaaaatattgcctcctataaaatcaacctttagaagaaggaagtcaaagaacatgctagatttcacaaaggttaattccttgaaatccagttatctacaggacaatgttgtcaaagaaaaaattatttggccaggcacggcggctcatgcctataatcccagcactttgggaggctgaggcaggtggatcacctgaggtcaggagttcgagaccagcctggccaacatggtgaaaccccatctctactaaaaatacaaaaaaaattagccaggtgtggtggtgggcacctgtaatcccagctacacgggaggctgaggcaggagaatcgcttgaacccgggaggaggaagttgcagtgagccaagttcaagccactgcaccccagcctgggcaacagagcaagactttgtctccaaaaaaaaaaaaaattcaatgatatttttaaattcatggtaaggaagatttcattcagaaccagcacagaagatataggaaacactgcaatgggactttgcggtgggggagagagattgaacacaactacatatacagcacgggcaaggacatattcatagccaggaagcagagcaaagatcagtggatgcgaaattactaagaggaaacatgaaaaataagggagcttctgcctaaacccacctaaccggatccttgctgaagacaggacagggtgattggacaccactttggggatggtggaggatggggaatccagtgagatttcaagggtgatcagatattgaacatagaaggttcttgctaaaaaaggagtttacaagaaagtgtacaaatgtgcctgggagaaggttcaggagcctgactaaaatttggtcaagcagagaatatttgccaagataatagctaagtcttctgacaaacaatagatgctaagccagcaagggtgatgtgctcagagaaagcactgagggcttatttccttttcccccaatctccactcagtcaagtctagtccccttgtcaatgtagccatttgtaagaatgcaatcaggcagggtcccatctcctagtgacaggactgactgaagttctgctgaagagagtggcctggggctgacaccgagatttcagagtcctgggtttcgccgagagctcagtgtagtgccatgccctctctccacctgaacgcccagtgtgggcaggaacaactgcagctagaagtctggcacttacgctggggtctaagacctgcctgatctgctaactagtcttgtcccttggctataaactgacgttggcacctggccagaaagatgagcaagagatctctgacacacctttaagtccctgtggagtaggattatgttggggaaggtcattctcttgactgagcagcaatttcagaaggaagtcccatgccgaagtgagagaaggcagggaatcctgcctagtcagctagagcaaaacagtctgcaggacgggacccagggatgtgatcctcccatccaaaggcactgaactaaatgactaaaatactttccagggctcacgttctttgaagaatggggactaaaactaagacaggagccagcaagtgaggacttggaaggagatggctcatctgatcagcctccactcaacaattttaatcatccacactggcatggggacacaatatgaataagttgacagggacctactctgattaagcagtgggctagtgcagagacctgtcagtcaagagtggacaggagatgatttcagacagtgagaacaaaattaacagagtcatgtgctaaagggtggctggaactacagaggagtttaagactcaagaggtctggctgggcgcggtggctcatgcctgtaatcccagcactttgggaggccgaggcgggcggatcacaaggtgaggagatcaagaccatcctggctaacgcagtgaaaccccatctctactaaaaatacaaaatattagccaggcgtggtggcgggcacctgtagtcccagctactcgggaggctgaggcaagagaatggcgtgaacccgggaggcagagcttgcagtgagccaagattgcgccactgccctccagcctgggcgacagagcgagactccgtctcaaaaaaaaaaaaaagacttgagggagttgtttatttttgttttctttttaagacagggtctttgttgggcgcggtagctcacgcctgtagtcccagcactttggaaggctgaggtggaaagatctcttgagcccaggagtttgaggccactctgggcaacatagcaagacaccgtctctacaaaaaatgtgcaggttgaggctgcagtgagcagaaaaacaccgctgcactctagcctggatgacagagcgagaccctgtctcggaaaaaaaaagaaaaaagacagggtctcgctgtgtcacacaggctggaatgcaatggtgcaatcatggttcactacagcctggaactcctgagctcaagcaattctcctaccttggcctaccaaagttctaggactacaggtgtgagccaccacacgtggcctcaggagagatcttaataataaaaggacaaattgccttgcatcccttaggggcaggattgacacatccaaggatcaggcagaaagcctgtgcggagtgggatgagcaaagagaaaggctgagagttgtgaagagggagatgcagtgccagctaggacaggcctttttgggctatgggaggttttcagaggagaccccacctaaactaacccataacattgcagtggggacctgttgaagtcatggactactacctgaaagccagagaaatgggaggagcctttcctctgaggagggactctagtccataggtatcttgccaccaaatacatggacaggccctgggggaagatggtggtagcccagctggaggaaaaccatttgccacctgaactagcccagggtaagccacccaggcactgagggtgcacacccatgcatgcacacacagaatcacactccttcctattattcctcaattcaggggtctcaacacccattttttttgtttttggggttttttttacatgtttacattttatttatttattattttgtgacagggtcccactctgttgcccaggctggagcacagtgcagtcgtgcaatcatattagattggtgcaaaagtaatcacggtttttgtcattaaaagttttgccattacttttaatgataaaaaccacgattacttttgacgcaacttaaaagctcactgcagcctcaaaattcctggtctcagggaatcctcctgcctcagcttcctgaatagctgggactacaggcacatgcaatcctacctggctaattttttaaaaattttttttgtaaagatagaaactcattttgttgtccaggctggtttcaaactcttgtctttgtgcctccctctgccctgtgcaagaccttctggatgcccactaatgaagacttccagggagaggaaaagtaaacataggtccctgatcaagggaccagggtttatcgaccacaaacagcatgcccagattccactggcagtcctagaggtcgcatttgccccaagtgtgtgtggaaggcctctccctagcagttggtttatacaccagccacagcacagcatattctcttaaattgtgaacatttgcaaaaactccttgaggacaactatcatgtcttgtgtacttttgttttgtttcccttcccctatgtacacgcgcgcgcatgcactcatgcacgcacgcgcgcgcgcacacacacacacacacccctcaaactgaatgcctggtgtgctgaatggatgaatggctaatgtaagtcattctaaaagctactttctttggcataccatcacctttgatttcatctttctggaactcctatgttcccagatgaatttggaaagccctcaggaaacatttcaaaattgctatatgggagaaatgggagggtctctctagaaatttacctgccacaggtatttctggtaagacacagcaaaggtggcaccacccattcctcgttacaatgtcaatgccagtcaccttcctgtcccataaaactttattaaaggtgcagaattcccatggaagcaggtggacaccatctgcttccagccagccaggggagcaaggtgtccactgtgcctttgtggcaggaactgcgcttctctactctcccactttgaggcctctggggctggcctgctgcctcctcattgacaaggctgcttactgagcagttcattctgagctggacatagtgcttctggtgagtctctacttctatttaacccaaagatattctttcctaaggaaacgctttcctgtcgggggaggttagctccagatggaagtcacaagtgatggcatggtagctctcatccgtttgggtggatgatattcacggagcaccaccatgagccagtcatggaggtgaacagtatatgccagccctgaatcaggtgcattgacagcaagggagacaagcaaacaaagctgaggtttgctgaggatgttcaagactcacacagcacagaggagcatccaccacccagcttgggaaaggacttgttatagagggggtgaagcatgagctgagtcttgaaagactagaaattagccaaactacaaggaggagaaggagtttccagtcaggaagaacaggttatgcaaaagcacagagactagaaagaatatcacattcaaggaactgcaaatagacaggaaagattgatgcgtgggataggagaggagggcaggggattccaggtgggccctgcttgccacactcaggagcttgaacttatccacaaaggaggtgtggaaccagtaatgaatgggttttgtgcaagggcttcatgtcaccagatttgctttttggagatacttctgtggctgatatgtgaggaagggatggaggaagtttccgtggcaatcaggaaaaccaattagcagatgattcaaatggcctaggggaaaagggaggaggacttggactaccatgcagcagcagaaatggagagaaataacagatcccaggcactcaggaagcgctcagaatgagcccttcaaagaacttatggtaggtgatggatggatggagtgtgagtcctgggatagcattgcctgggaaaatactttctagttgagacagggaagtgggccagcagaaatggagggcttcttctttttgctttaaatacttttataatatttggaactttgaaaatgagcagatatattagcaaaaagcctaaaagggatatttttgaaatcactgctagttctaacatataactttcagcttgcacacatcatcaattaactttgatagcgcctttctgaaactatcatcccaaatagcaatccttgtaaaaacctattttgaaaaacgggccttgtaggatagcctcacagatgttttgtggtagattttctaacattctaatgtcagggagtgaaaggaatcccgttagaagttggaaaattctggaatctctattcatggtattaaagttttgccgtcacacaaaagtttaacacctttacacaatcagacttcctcattttacattgctcggtaattagaggaaatcagtcacccagagcctgggtcctagacttgacaaaatgcacccaacaaatcctgagtggccttgctgaggacttctcccagaagatagaaaactcagttccagccaacaagggggaagcagctgaagaagtgaaattaacaaagtcctggaaggaaatgaccaaatcatctttgattgtgtaataaccagagagtagaatacagctacgacagacattttgggagagaagcattttatcatagcttttagaagagaatatttttcagcatcataagcacacaattccaagacagatactttcaagggattgttttgacgatgttnnggttttgggaccccattcaaacttcatgttgaattttaatcttcaatgttgagcgaggtcctgtgggagggtgattggatcatgggggtgggttctcccttgctgttctcaatgatagtgagtgagttctcacaagacctggttatttgaaagtgtgtagcacctctccccttcattctctcactcgtcactgctccgccatagtaagatgtgtgtgtttcccctttgccttccgccatgattgtaagtttcctgaagcctcccagctatgcttcctgtacagcctgtagaactgtgaatcagttagacctcttttcttcataaattacccagtctcaggtcattctttatagcagtgtgagagtggatgaatatagtgccatatgtttgtattcccagctacccaggaggctgaggtaagaggattgcttgagcctgggagtttaaggctgcagtgagccatgactgtaccactgctctccagcctgggtgacagcgagaccttgtttccaaaaaaaaaaaacccaaactgtgtaaaatgtgttcataaaagtgtcttgctcccacacctgtccctatatatcttattcctcagcctccgacaactactttattcatttcttatgtatcttccagaatcaaaaaaaaaaaatcaaatacaagcacagtggaatgtattgcccttcttcccctcccttttgttacatcagagttagcatatcataaatacggtctgcattttcttctttttcagctatcagcatgttttggagaggatttcatattcgtgcagacagcatgtattagtcagtccttgcattgctataaggaaatacctgagactgcataatttataaagaaaagaggtttaattggctcacagcttcgcaggctgttccacaggaagcatggcagcatctgcttctggggaggccttaggaagcttttactcatgcagaagacaaagcgggagtggatgtcttatatggcaggagcaggactgagagagagagagagagagagaaaggatgccacatacttttaaacaaccagatcttgtgggaactctgtcacgagaacagcaccaaagggatagtgctaaaccattcataagaactccacccccatgatccaatcaccccacaccaggccccacctccaacatcggggattacaatttgacatgagatttgggctgggacacagaaccaaacaataccagagtgctttctcattcttttctatagctgcctagtattctatgtcctttacttcatttaggcagtctcttgttgatagacacttgggttacttccaatttttcctattacaaatgatgtgcaatgaataattttgatcattttccatttcacatgggttatgtccatctgtgggataaatctccaggagtgaaattgctggatcaaaggggaagtgcacttgtgattttcatagttagcaaattttgttctataagggtcatatcaatttatagtcccacgcgtaatatttaacagtggggatttcccgacagtttgaccaacaaggtctgttgttaaacttttgatttttgtcaatctgatgggaaaatactagtatctcaaagtgcttttaatttgactttcttattacaatgttaagcatcattttactctgcccaagatcaaatagtattttcttttctgtgaacagactgttaagatcccttgcctcttgttttgctggatttttgttcttttttttcaaatgttttgaggcagttctttacatgtgaaacaagttatctctttatctggggtgtgagttacaactacttttcctctggcttgttttgcgctttgactttgcttctggtgattcccgcaattctgaaagtgtactttttgcatcattcattcttatacacccatgctcttgttcacgctggttcctctacctgagggctttttcttttcttttctatctgggaacattttttagagacagggtctcactctgtcatccacgctggagtgcaatggtgcgatcacagctcactgcagtcttgaacttctgggctcaagcaatcctccagtgtcagcttcccaagtagctaggactacaggtgcatgccagcatgcctggctgattgttttatttatttatttattttttgtagagatgggagtctcactatgttgcccaggctggtcttgaactcctgggctcaagcgatctttctgcccctgccacccaaagtgctgggattacaggcgtaagccaccatgcccagcccatgtgtggaaatcttctgtttatccctttaggcttgattcttatgtcgttctcctccctccttcctggctactcctcttgttctttatcttactctacttgtcatgttaccttgtttctgcttataactagctgcctctcctatctgaggagggacttgtgactgttctcatctctgtactcccaggtcctagtacatagcgcttgctcaacagatgtttggtgcattgatagataaatcaatggtagctgttaataccagtcctgactccctgcagtgcttcagctgatcctgttccagatgtgcactgaatatctttctgttgaacaacagaaataaaggggatgggtgaggaggatagtcttcggtggccaaggatatttgtaggtactttgcagcactcagcaatgaggagtgggctttagtcccccaagaactctcacagccctgtttgtctttactgttcagtgtcaaatccaagacaagtcaatgatcaggaaagacctttttttttcttcagtgaagtttatttcagaaccattgaacagtatgatatttgctcatttataaatattcccatttaaataatctgagcttatatattttcagtcttaattaaaggacttgatttaaagagagcacaccagtccaaattgaattgattccatagctattaaaaactaggctcttttacagacactgctacttcttgccccctttgaataaattagaccaatgaataaaacaaacaaacaaataaataaataaatagggaagcggttgctcatcagaatgtgggagcgaatgacagagggtttcttagaaccaaatgtggccgtggtttctgtcaggcgggctttaagtgagtaggagaggtgagagaggcctggctcaacaaaagggctggggattggccctgaaaggagagagctgactgtcctggctgatggacaggagatcctcttagcactaccctaaggcaggcagttgggcattggtgtagacaacaggaaagtccaggctatagccgtactcaaaaacctttctgttccctttctgccagccctagggattgagtccacattcagcacaggactctctgggtacagctctctttaggaagacacaaattgcatggtgaagtcagttatatcctggccgcctttggtccctcccaggaagacgggcatgttttctgcttgagaggtgctgatgtaccagttggggaactgggcagactcaaattccagcttgttattgatttctatcttgttgaagacaaatcgcttttccatcttcttctttgggtaatttttgggatctacactctgcagcgaaagagaaagaagaatttttgtggggcaagggacaaaaatgctatgggaaagatgttctttgggttggccagaaaggaaactgacgagcaggtcacatgatcaggagccacactcctgagttgtaactgggcccccaactttctgtgtgattattaaaagagcccttcttcttttctaaaacttagtgccaaatgctgaggagcataatgtaggtgagaattttttttttttgggggggtgaaaattaagctagagcttcttgaagtacctagtttccaggggctttttattgtatttttccttatggtcctagaatgacatcaacttggaaatgaagcttttgctgagaaagctggaggtgatagtggtggtgattttgggagtggagtggacgtgataatgggaccctttaagtcatctatttcccaaggtgtctatcaaatgagagcagccctaacaatatataatctgttggggttgtaactatggtaggacataataacatcggcaaaatgatttaattttctgcagcaggattgaaggttgcacgcagttaaaaattatgttaaatttatttacattaatgcaaaattgtcaaatagacctgttcccagcttttcctagggatgggggcggggagaaggtggttgtctgggaataagtggtagcaggaggctgagaagggcttcattccatagcattcacttacctccagctgtagagtgggcttatcatctttcaacacgcaggacaggtacagattcttttccttgaggcccaaggccacaggtattttgtcattactttcttctccttgtacaaaggacatggagaacaccactgaagaaagaagggggtcttgtggttagggacacagcagtgcagggtcaccccaacccctaggccccatgagtaggatacatgtaatttggtagcctctgtgggaacccacagtgaggttccttggcctaagacacaggataacttgacttctcacagacaatagcagggtcattttgttgatttagggtttcccctcaaaggcctgagggtttctcagagcctcatagcagtaggaacggagaatgaaagagggtctacattttaaatgctgaaggaaggaaggaaggaagccattgtgtcactggctggcaatgtgcccatccacaggagcggaacaacttgatcaatgtggaaggaaaggaaagaggtgaggctgtacttctgccagaaatcaggcaccagaactgtttcaggaacagagagtagcccatgggaagaaactgggagaggagaggctgagctgggaaagtggctccaaagagagacactcattttgatcttcctcagtcacagcagtgtcaattggaaggccctgggatcactcttactacccgattccaaagaaacaggattttcttggcctggctgagagcaaatagcttcccccttgagtgaggctgtccttcaaagtcagcagccttagttgcccacactcctgtgcagaggctttggctactgtggcacgatgccaggcagatcaccacagctaatgatgggttcaccgcacttgaaacttttgcccgttacagcggagagatataagttcctgctgggcggtaaaatttccctacaaggaaccacctggcattgggtgggacggatgttggggcaaggggggaagactggggagggggatggacacattatcgctccagcactcttgtttcagcctcaacaacaggaagagagaacccacaggcagttaggccatgtccatcaaatgaccccatattgtggaagaattgacattgcactatgcccaagagacttgggtggacatggtcctgggagtgcttgagccgtctaatttctcagggtcacactcctgttaacaaatgcactggccagtgcaatcaaatgtgccatttctaggaccaaagtttgtatattcctttttaatattttttttcacttgtgttgatcatttgccttaaattaactttctactttgtttaaaacatggagaattagcaagctgccaggaagccaggcagggaaaccaggatgtttccatttaccttgttgctccatatcctgtccctggaggtggagagctttcagttcatatggaccagacatcaccaagcttttttgctgtgagtcccggagcgtgcagttcagtgatcgtacaggtgcatcgtgcacataagcctcgttatcccatgtgtcgaagaagataggttctgaaatgtggagcacatgttgtttaggtataaaatcagaagggcaggcctcgtgaggcaaggtggcaaaatttgatttcttggaggacacctgagcatatacggtcaaagtctgatgacaacaccagtagggatgaagctgggagtggggtggctaagaacactggacctgacactattagacatgggttccagcttcaggtctattactgctcactgtggccgagcaacagagctacttaggtaaaatggtgatggtcataacactagcccacagggaggttacgaacctctggtgacaatgtaagtgaaaggcccctgagaaagagtgagggagttgcaaatgtcagtagccatcaagatcttctttaagaatagtttccactaaagagatgattgctttggtttccagccttctttgttttgtctccccgctgggccttctacctttaaagggctttggctctgggggaattgagttggctggggcttgatgacttccaagaggacacaagtggagatctactgcctgctcttggctaactaccttcttcaaagatgaagggaaagaaggtgctcaggtcattctcctggaaggtctgtgggcagggaaccagcatcttcctcagcttgtccatggccacaacaactgacgcggcctgcctgaagcccttgctgtagtggtggtcggagattcgtagctggatgccgccatccagagggcagaggtccaggtcctggaaggagcactgcggagagagcgagggagggagcctggtgaggtggtcctgccaggaaccatgctttgacatcagagagtagaaagctcagagaggaggaaagggcttgaaagaatcccgagcttctaaagatcatccctctctgggccaggcgtggtggctcatgcctgtaatcccagcactttgggaagccgaggtggatgaatcatttaggtcaggacttcaaaaccagcctggccaacatggcgaaaccccttctctactaaaaatacaaaaattagctgggtgtggtggggtgcacctgtaatcctagctattcaggagactgaggaaggagaatcgcttgaactcaggaggtggaggatgcagtaagccaagattgtaccactgcactccagcctgggcaacagagtgagactctgtctcataaaacaaaacaaaacaaaacaaaacaaaataaaataaaataaaataaaaagattatccctctctgaagctcaaggaggttaagggtgtactcaagggcacacagcaggttagaggcagactcaagactagaatgtgggctttctgacaccttacaggctattcttttagaataaatcccatttctactttgttcatcttttttgtacatgccccacctacaccatacatgtataccttctctatatctttttgtatccctaatgctgtcacactatgatttgctttttcatgcagatgaccataacattttccattcacctatgctcactcagcaagtattcaatttttctacactgttcttttttttcctttttcataacactgtctcataggcattctgcaaatcctgtgagagtactttttgtgaaatgttaccactttcctcttattcagagaagctccgtattaaggcttcactgaggttgccttaaggcatgataatggttcaaaggcttgaaagacagttaaagagacctgtaagtgcacaaaagaaagttgagcaggagagaatttcttgcctggagcagagccaagctactggaagaggcaatgggggcaaaggccaggcagacaagccaatgggctcctcccacagctgcagccaacaagttatgccagtcttaaaacttctaaagaaatatgtttttaacaagattgaggactggattatgaggctaggggaggctatcacaaactggaataaaataaagccagagaaaagtggctgccttccaacctgcacaactgacctagctaggctgatggctgggccacctaggaaggctactgagcatcatataaaacagaagggacagcaggaatataacatggctctttgtaaggatgagtctgaaaaatgaccatttgctgcccaaatgcccttagctacaactgaaaatatttcagaactggaggttgcaggatgctggaatctcagagatcatccagctcagccctttatttttcagatgaggtccaaagcgggtaaaatgacttgtcaaggtcaaacagcaagtgaatggttttctttcaagtctcaattcatctttttgtttatatcatctatgtcttgttgttataagcttcaccccaggtagcaaaaaactattctactcaaaaggggtagacatatgttagttctcaagatcatctcttggtttcagagtttaactcaagtgattggcataggctgaatccatctcttaaaaggataatcaaatttatgttgaagacttggttgtcttcctactatgaaatgggaaacattatcactactcctcccctgtcaccaccaagtgtggccaccaccaccaacgttagtgagtgactgtggtgatatgatgaccaagtggccaggtcagcaagtggtgcagcctgtgtctcactggaagaggttaaagtctttctaaaacaaaataccatggcatcaaagtggcccagaactcccttctttgagctttccctgtgttagagcccttccttgggttgggagttaaacccatagtcttaccttcatctgtttagggccatcagcttcaaagaacaagtcatcctcattgccactgtaataaaaacagggacatgtctcaattatgtcttctaaacaggtttatttttccttccctgtgtacaagacttgactgttcataagaaactgcaaacagcctgcctctcaaagctgcctgaaacacctggcaagtttcacagtgatatgcgcagaacagtccagaaggcagattctaggcctggcaggtgggcaccctgggtgctccctgttggatcttgaggcctaacctctagcccagcagagtcagctaaaatctgagctctccctctccctccaagccacactttgcaaagggattccttgtattgtgggcttggaatcttttctccccatttgcctctgcaggaagcccttgcaacaacacatctggatagcctccaggtcccaaggctggagggacttgtaatgggaaagtagtctttaaatcagatttacttggcaccctgtttgccactgaaagaggcaatttaggggaaaaatctggtctccaagcacagataacactctactcttgaaagaggagacctgctcatgttactggtctcagcgtctccactgacctgtaataagccatcatttcactggcgagctcaggtacttctgccatggctgcttcagacacctgtgtaaaaaggagaaaatgagtgacttccccatgacggctacgttcatgtgtgatttctctcagcatccagtgcatggcagtcatgcaaagaaatgatctctgagtaaatgaatgaatgtgtgaaagagaagtcctttgggtctagagaaaagcatttgctaaaccaaaccccaactagcaatgtattggctaggagagctggagcagaggctttgacactaacctttagggtgtcagctgttagataagcagtatccattcccagaatatttcccgagtcataagcattatattacacctggcatttttgcaaaaagctgagagagggaggcagagagggaaggagagggagagacagagaaagaaagagagagagagagagaatatgcatacacacaaagaggcagagagacagagagactcccttagcacctagttgtaaggaagattaaagtcatacttgagcaatgaagattggctgaagagaatcccagagcagcctgttgtgccttgtgcctcgaagaggtttggtatctgccagtttctccctcgctgtttttatagctttcaaaagcagaagtaggaggctgagaaatttctctgttgaatacctgatttcacaatcaagttaaaggaaaggggaaaagagtattggtggaagcttcttaggggaggggactaataaactgagataattctctggttcatggaagggcaaggagtagcaaactatgacacattttgcaaatgtatcaccatgcaaatatgcattgttttcctgacaatcgttgtgcagttgatgtccacattaaaatactggattttcccacgttagaagaatgtttaaatttagtatatgtgggacaaagtggaagacacacagatttatacatgcacatacttttcttcattcacttctttgtacttaagtttaggaatcttcccacttacagatggataaatgggtacaatgaagggccaatagccctccctgtctgtattgagggtgtgggtctctaccttgggtgctgttctctgcctcgggagctctctgtcaattgcaggagcctctgaggagaaaattgacctttcttggctggggcagagaacatacggtatgcagggttcaggctcctgacggagttggggcaaccctggagataagctcacacaaccctgcaagaccaggtgctgttaccctagccaatctcatggatgaaccagatcaatgccagatgagctctgcctaaaatgattttttggtgaactctgaaaagtggaatattgtttctgtaagaatatccatctgagactctatctcttggtaataccaagagttatcagtttctctttaaccgagacaccagcaaagtgcctgctccagggtactgcccaggggagccctccatttgtagaatgaatgagagtccaggttatgaacagtgcctggagtgtaggaacaccctcctttgcctctttgacaggtctgcatcataacactttttttttttttttgagacagagtctcactctgtcgcccaggctggagtgcagtggcacgatctcggccccctgcaagttccgcctcccgggttcacaccattctcctgcctcagcctccccagcagctgggactacaggcacctgccgccacgcccggctaattttttgtatttttagtagagacagggtttcaccatgttagccaggatggtctcgatctcctgaccttgtgatctgcccgcctcggcctcccaaagtgttgggattacaggcgtgagccaccgtgtccagcctgtaacacttcttatagcactgagttgaaaccttgctcctcctggttcctccaggaaactgaaatctttttgagccaagtctagcacagtgcctggcatgtacattcaggtggtagagtttgctgcttgaatgggtgaatgggaatttgacagcatttttattcaaattagtatgtgccaggtatcgtgctcgctctgcattatccaagggagtgagcctctgtgcaagtatttgagacacgagggaaataggttctactgtgggaaaaagagcatttcatggacttgctctccaagcagccttctgatttttaatttggctcccagtatcttgatatcaggagtcagtcacaagaactccatctttagtaagttatattttccacaggaaatctaaaagctgttcaacatgttagtttcctgtgaatttgataagccataatccattcctaacactgagccctcctgaaatttggtgtctggtcctgcagatagctaaaagccctgtctgggtggcctaggggactcctctgttttgcctccacaggatccactttgcaaattaaccactggttctcccgttgtaggaactgccaccttcctcagagcctgtctttcttccttccttccttccttcctctttctttttctttctctctctctttctttcttttcttttctttctttctttctttctttctttctttctttctttctttctttctttcttcctttctttctctttctctctttctctctttctctttctttctttctctctccctccctccctctctctctttctttctttttctttcttttctcttttctttctctctttctttctccctccctctctctctttttctttgtctctccctcccttctctctctctttctctttctctctctctctctcctagacaggatctacctttatcccccaggctggagtgcagtggtacaatcatgcattcattgcatgatcacagcagcctcaaacccttcctcagagtctttatgcggcaaccagcagggtctggagggttggtggctctgtgaactctcctgacagaacacagagatgtctttggtctgttgatgtgattacaagctgaacgaaggaggatcaaagccagtgacaggaagggagatatgcaagggacccgagcatcagctctgagttagtccattctgcttctgggacttgggatacaggtcagaaaccttgagcttctacttctccatcttccaattgtagcatccaggacctcagaatctgccagctaagaggagccctaatgattgtctggtgggatatggtgggaccacagagatgaagacatgaatagctatttgaatgtgaacagcagacgaagaaatcaaggctaggagggtggaagtgactcatccaatagcacagtgtggttgaagcagcactagtatccaggttgcatgagcccctgatgctttcgctcgagggaaattttggagccatggggcaatgccccctgacgtaacagtctccacagttctgccatgtctcatcctggccctgtaacctggacccaaatctgctaccatcccatccatctcaggaagtgaaacctcttatgtcaaataggttgtgcaacgtatgtatcagatcctgtcttcccaaggagaccgctcaggccacagcacttccttccgatccccaatgagcagaaaatatctcgctataaacatagttggcactaagggagggagtggaagagtgatgatgatgtagatggtgatgtagccccaaggaagtggaacaagcagagatggggagctggaaatgccaggatgctccagcttttggggaattattcagctcttgagtcactaaagcctttctcagctgcaagttcctctttaccctgtcaggtcattcttccaagacaggagactgacatttattcaaagcagcaagtgccctgataccatcttgtgtctaatcatgggcttcgcagccagttatcaaggttgatctcatctcattggtcttcaatcattttgaacaagaagacaagcaaaataatcatgggttagttcttatattattgtgtgtacatgcagtgatgtctgttctttgtagtgagctgttccttccttgttcaccctcttgcttagaacagaactaagcaatctgcccccaacattttccccaatttcccatctcattcttggcactggcttcctaatatttgttcttatgagtcattttcttgtatcatttccatgagtccctctgggatcttaaagtatgaaaaatgttgtgtgtacccacacctgtctttgtggatatttctctcctttcccttctgcttctgggattatttgggaatgggcactatgatttttatcatatcgcttccacttcctttatggcatcatctccaatgggcttcttctccctcttggatccaggttctcagattggggacatgcagagtccaaggaacattccattctcctccctggtctagaacaaggagggcttagatatatgagcaggtggctggggctggcgagctatgtagtctccaatggcttttccctgatgtcggagttgttatgtcagttctgggagaccaataagaccttgtccttcctttggatccatcagaaaaagcccctgggtgggtaagatggatggcagggctctcctactctatgtcttttctcacacctagtgggtataagagaggggaccacaaacagagggggctctggtaccacttatccagggtctggaaacattttctgtaaagggccagataataaatgtttcaggtacaactactcaaccttgcatcatttcagaaaagcagtcagataatacataaatgaatgggtgtggctggacttgtcctgcggtcccctgtcttatatcattgtattatatcattttttcttacatacaaatttagaagcaatacttaaaaaaaaaaagccgtcctttattgagcacctactaagtgccaggtacctttttttccctcattatcttattaactcttcataataacctttaaagtagataatattgaaccatttgacctatgcagaaactgaggttgagacaataaattatttaagaccgcacaaacagtaaatgctggaactacgactcaaatatgggttaactgaaccaaaaccagatctttatttctcacttttaattgttacatatgtttattgcctcatctcctgtccacatggtgcccatcggcagactcctttctcattctcagtgattgagtgacattctaaactacattggcctggcagattcacctctgtcccctaaatgtttccacattgtccttttaggattgagatcctctctgttcccttgtcttccctcctttcttcttctggcggtgacgtgctgtgtgaatttgtttctttctcctctcagggtagtactgggactttccaaatcagggtttttaatgatctctcttcncttttctgaatttcttccttattcccattcactttctcatctataagtggcanctttgttgctggaagatatcccttgtgcagggattnctctttaanaatttgtcnnnaccgtgatcgtcaacctcccaccctgtagggcctcaagcattgaggacaatcactggctgcccattaacccagaaatgttgccgagacaggaggccgtggcccaagttcctggaatggggtattattatgtcagcacaaaggcctttgcacaaatgaaggctttaaaaatgcagtcctagtcaggtggaggagggcttataggattcccaggaatctggatcattctcttgagagctttcccttgtctctgttaaaactcacatcgtacggcccaaataacaacaaaaaatggatgtaaattcttgaaataacttgtggatgggggaacaaggcccaccccccagatctgccagaagcttcaggtgagggtcccaaatgccaaaaagtctggtatcagagaggatggccagtgacntggggacacatgccctttgctgtgtcactcaaggagcagcagcttcggccccgcacagtgaccaggaccctggcttcccacgctgggcaggagctggtgtctgatgaagggaatgcctggcagcacgtgctgtctgtctcctcgtgtcagcttacctggctttgctgcgaagaggccacttgcatttctttattttttatatttttttaattttttaaattttttattttatttttatttttatttatttatttatttttaatttttttttaattttttaaattatgctttaagttttagggtacatgtgcacattgtgcaggttagttacatacgcatacatgcgccatgctggtgcgctgcacccactaactcgtcatctagcattaggtatatctcccaggttaatccctccccccctccccccaccccacaacagtccccagaatgtgatgttccccttcctgtgtccatgtgatctcattgaatttctttaaaggtggaatctctcagtggggtctaatctgttcagaaatatcaaaagagtatccttgggaatgactggaattccagagtcatctggtaatcctcataaaacaactcctggatgtctctcagcacatctcccaccttgaacgcaggaggctggttcaaatggaggagcatcgctctactgcacttttttttttttttggcctaaagtgcaaaaggggatacgtttcatgtaaataaatcaactgcaaatcgctagttatgctgagccctgtcccgtgctgtggacacaaaggaaccaaaggcttttctccccgcccaacacacacataacacacacacaaaatcataaaaacatacatacccccaacacataacaacacacaacacacacacaaaatatatacacacaacacacaccaaacatgcccacaaacctgtgtccaaaaataaatcctactggtgggtttgtggtctccctaacttcaaaaatgaagccgtggaccttcgcagtgagtgttacagctcttaaagatggcatggatccaaagagtgagcagtagcaacgtttactgtgaagagcaaaaggacaaagcttccacaacccagaaggggaccccagcagggttgctggttggggtggccagcttttacttccttttggcccctcccatgttctgtttccatcctatcagagtgcccttttttcaatcctccctgtgattggctacttttagaatcctgctgattggtgcattttacagagtgctgattggtgcgttttacaatccccttgtaagacagaaaagttcctgattggtgtgttttacaatcctcttgtaagacagaaaagttccccaagtccccactggacccaggaagtccacctggcctcacctttcaactccataatggcatgaaaatacatatgttgtacaaaacatacatacacaaagtatacatgcatctccccaaatatacacataccacagaaacatacacacaggaactcagctacctgtcaaaagtctgcatggtgattgcctctgcagtgagtagttagaaaagtgaatttgtttttcaataaattggagtccttaaaaatcgttgtaagatagaaaatttttaaaagtatataaaataaaatatgtatgtcctttggtctagcatttacacatgtaggaatttatcctagtggagtaatcaatgatatatgcaaagatttggacaagcatattaagcacagaattatgtatgcatatgtgtgtgtatatatatatatatctcatacatataataatgtaaaagtgaaaataactcagatgttcaaaattgaggattagttagactatgatctgtccatatgtgacatacaagttagctgccccttattctctcgagcttcaacctcctataaacagtgtcccttgtatatcagtattggtacagataatcgaacttattgaggttttacatggggcaataaaggcaagagtttatgaatactccatactacactaggtagcaccccctattaaagacaaactcttctctctcatttcccttcctttccggaaccacttggttgaatctctacaagtctctattgcaactgcctcaacatggcaccctccctgcatctccatcttccctgtcctgagagcaatggcctgctgcccccacactcacatcctcattcattccagaagtgagcaccacagaagtgcctacagttaccccaaccaccttcttagaagataagttagtgtttgttttgactttttaaaatttttacttcctcttttccttcacaatctcatcccatcccaagaggtttatcaagaagttctctaaagatatgtgtctccttatggaatttaacagaaatcagggatttgtattctagccatcaagggaataacatttttccaggtctttagacaaataatggaataccttgcagtaattagatacactattgtagaaaagtattgatgaaatggaacgatgtttgagatatcatattgagtagaaaaggcaagatacattaagtaggaaatgtatcttacaaaataatttgtcagacacactcctatatttgtatgttatataaatgcgtatgtgaagaaaggctagaggatgagaccacagtcttcggtgaagtttaagagatgaggctgcagcatgctcagaaaggcctgggttatagttcttccagtaattaaggatgtgatcttgggtaaattgtccatcctctctaaactgcaccaccttttgtctgtaaaacaggaaggatggtatttacccccagggtcatcaaaggatttggttggagaaaaataaataaatgggctgagcccagacctggcacagtgagagcacagtggttgactattgtgctggcctgttgttcctgtgttattgacatgctgctggtggtggtccagaagctattaccttaattggttatgtggatttcccctcatactgagcagctgtgtgtggtgttgtaaaacatagccatacacagtaactgacaagggcaaatgtgatggaaaaatgcaaggaagtgcagataaatagctaatgggctgtagaaggaagctagtccttggagggcttgatcaaggaaggtccttttgcatgtcacctttgaagaagaggggacatagaagaggtatagtgcatcccggagtgtacctggaagggaacatgaaaagaggacatttttctctgggacatggggactccacttgcatgaactctggaattggggcaaagaaccatcatgagaacaagggcttccttgaacctcccaggctcattggctgatctaaaccctgtgtcccctctttccttcactctcctctgttttctatacctgtattattggactggactggaagccacctgatctatcacaagtaccttgaaatgtgttgaataggtgtggcacagtccttagcagagtggcactacccccacaggaatttgtttatacctttggcatggaaaatagcaggaaatgagtgatcactgataactgaggatgctatttattattggccaaaggaatacttgtgttgtatttgcataaccactcacaaactgttgattacaaatgagtaccagacctagctccttcaagtaaaggatcctgagaactgaaggcaaacagagctccaggagtccaagacagagccacagaccacgaggatccctggcccaggtaggtggtcctcctgcactggctttcaaggccaacaggatggatggggaagtagagtagcatctggccatctagacccttgctttttatccccactggaagcacatctgaatttctaaatatgatctctgagacctgcccagaacaccttgctctcagccccagtagcagcctgctctctcccaggagggcttccactaacaagtagggcattgctggagggccaggcagacactagcttaggaaatccaccaaccctggaaatgctagtcccttctctgaaggctcagaagactgactttagagtctagaaaatattggtccttgggaacagattttgagtgcaaagagatggacttcagatggccagatgcactgcttctttagggaattctgtgaaagctccctgcatttatcttaatacaggcagcagatttcatgagtacccccgagggatggccccaggtcctccagcctgtgagcatccttctgtccttcagcagcaccacagtatctttatatgtctttggatacctacgtttctgccagacatctcttgctctgatgttctggctgccaaattctctgtcaagcgcctccaattttttgtgtcctttgatttaccccaacatgacaaaggcagttgtgcttcatgtattcagggatactgccaaaccacaaacaggttaaaatcaaatagcagatatccctgttcctaaagacccatcagctctacccacctgctcctgctcaccgtccttattgttgagtcctgaagcccttccttgtcatttttattttttgcatgaacaatttagttccctttgtctcactcctaaacctttctcaaaggattggatttgtacacaaactgcctatctctgcaatcttagaagtgatatgattctgaacaaatcacttaacttttgattttttattggtaagatgggaataccaatttttgctccacttctgtcctatgttggcctgggctgatgttgaaagctctcggtcaactgagatagggtgtgcagaatttatatatataaatatatctcctccaacccctcccaatgaagcaagtcacgtgagtcaatcctaccctaagatattagggattgagcctcctgggacatttggtggcttaggttttcatgaaaagaggttgcagagcaactgctttttgttaggcaaagattaggctactgcagagactcagcaaacttctatagaaggtgtcagatggtaagtattttaggctttgcttgccagatgatctctcaactagttaaccatgctattgtagcctcgaagcagccagagacaatatgtaaacaagagcatggctgtgtttcaataaaactttatttaaaaaaacagtcagggaccggatttggccaaaggccatagtgtgccagccccaagactagagcaatgcacttttaacttttttattttatttttgtaaaatgccaagatccacaaaaatgctattgcaccccgtgtgttagcactgtgactcaaggtttgggaaattctgctttgaaggcgtgatagacaggagagcatggtctggccccttggtgcctttctggttgcagcgagcatttcaaactacagagcaaggccagtggtctgttcagcactagagacatgcagcaaggtgtcctggggtgagaagatgccataactggtcccctttctatctccttaggtcttggacttcattccattttctgttgagtaataaactcaacgttgaaaatgtcctttgtgggggagaactcaggagtgaaaatgggctctgaggactgggaaaaagatgaaccccagtgctgcttagaaggtaaggttcttgtagaaatctacctcagggccaaagtgtaattcctagagcagaactttgctaggtgctgtgcacagacccagttgtttcctgctgacttgcacagtaagtgagctttcaaatttccctggacaaataactagacaagagaaattctggaagagaaaaggaagctttgcttcagtgtccaggcacatcaggtagtagataaaaggatcgtcctcacctacagatttggggctttagcatcctgtttgccaactggatggttgcatatgcttcaaaatgcacctcttccctcccaacattcccaagtggaagagaagcctccgatgagaaggaactctctaaggctgggctgaacaaatgacccaggcacagggcatctgagtattccatgaggaacacatttgggtgttgcccatgggggacaataggaggaggcttttgacccaaatgattgtctactgaggtgtgacgggagaggcctgtgacatgccagaggccaaacccgtgatccagttcatctctattctatgtttctgaagagggaagctatgatttaatgtcattactatcatgctgctctagtatttctcagcacatacacagaagagggaattaaatggtccttgatacccctaaatccttggaaaatccgaattgcatatgctaacctcactgcgtctgactgcagacccggctgtaagccccctggaaccaggcccaagcctccccgccatgaattttgttcacacaagtaaggcctcggggtgaggtgatgggggtggctgaggtgcgagggtggggatgggggatggagccattgggtcctcttacagggtgagagaattgtagaatggggacacctaagggtgctggatggggctgaagtctttcctttgtggaagcaaatcccattaggagataactctgggaaagatgagcccggggaggggcaggtgatgctcacctgctaagaggcaaagggcaaggaagagtttgtgcctgggaaccttccaggtgcctcttctgaccatagccaagagactggagacacagacctcctcccagcactgaggacaaacagccatggggccagtgggggtgcagggacacccacaccactaagggctcagggcggcgccttcagagcctgaaccttcctctcatgctgccatttgaacaccacaacaccctaataggaaactgttaacattgccactgttcaggtgtggaaaccgagacagacagtggagattccctgccctaggtgacacaggtaataagtgacagatgtggaaatttaaaggtactataacgtctgtctgcctgactcaggcttaaggctcccatcacctcctcttctcaggacagagtcaggaggcctcagcctgagccccagctctagtgcaggttcatgtgggaatactgagcctcactagtacaatggcagagaggaccaaatgggaccaggtgtgtaagggtgcctggcacagttgggggaggctgctgtcgcttctccaccgctgctgctgcagttacctttgatgttttagttttgttgtagttacaccattgctggctttggatctgcactgtgtccactccaggtggaaccacgcacacaagcctctctgtcgggcctgtcctgacttctccttgtcagggctgggatctccttcaaatctggcggaagtggttctccaagtctggtcctcaaacgtcagcagcatcagcgcctagaagtgttaggaatacacattcccaggccccaccacagacctcctgcctcagaaactcagggcgctgaggctctaggggctgctttaacaagccttccaggttatcgtgacgcaccttgaaagtctgagagctactgccctacagaaagttactagtgccctaaagctggcgctggcactgatgttactgctgctgttggagtacaacttccctatagaaaacaactgccagcaccttaagaccactcacaccttcagagtggccttgagaaagatttggggtcaaggatcatgagcgagaacaccacttaagaggatagtgaactagtctgcatgtgagacgctgagatcctatgtcaggctgtgataggagggaaacagaaaccaaaggaaagaacagctttaagaagcgcttaagaggtacaaagtaaaatgatggtgctagaaaagtagcttcttaaaaagagcattttccagtctcaccctggactaactgaatgagaatctcaggagtgtgaggcccaggtatccatggtcttaaaatgccacccaccaggtgattcccagtgtgcaccaggggtgagagtcacagccttaggccatgccactcaaagggtgtcttcagaccagcagcacccacagctctgggagtgcatcagaaagacagaggcttggcaccacccacacctactgaaccatagtttgcaggtgatttcttgcacattaaagtgtgggaaatggaaaagcttagagttcagctagctcggtgactctcagtcaacctgcacctgctccatgaactcagactgcctgggatgggcccagaaaagctcctgaggagattctgatgtaaggcagggctgataaccatggatctcatctgaccccatatcactggggagttacttaggatcttgcctggggccagtcatctcttccatagacactgagagtgtccacgatgcttggggcactacagggtgggaggtggaggatcacgggtgagtcagataggaagcctgctcctggggagcttacagtgctatagggcagcaagccaaggatgccaatacctgtgtgcaggtaccactgacgagtgcagagcgctgcagcaccagagaggaagctaccctgtgcagagggggctgaggagggctgcagggagatgacaggaaagccggtgttacaggaggagtcctccccactctttgggcatgaggagaccaggaggacattctacagtgagaaacccaggcagaggccatgtgcttatggcatgggaaaagaatgacaccttagacttattctctacattagaattgcctaccacagatacccatattatagcttcacatagtgtggtggttactgtgttttcatattgtcacatttgccattttccagccacccacccattcttgacagtcactggcccagcctgggggcccctgttctttatcaaacaagtgcctgagctctttgcagaggtgagggtcacctgtccaatcagaggccaggagggaacgttcccttttaagaccctactctaggcaggcctggcccaaatgagttgctaggagcccacgccctaagaaccctctgagcactgttgtggctggtcctgctgctagaagttgttcctccagggccaggtgcaagatttgtggcttttcaaaggagccactaaagctccagctcagccttgcacggtgctgggctcctgggggcttcctgcctccaaccctcccaactcttccatcaccgctcccttagcctggccagtgcagggatctgttccactctaggcactgctgagggaatgatgcctccagtcagagggtgcaaaaaagagagttaagaaaaacaatgattataaaaagtcctttttatacgccagacattttctttgctcaggctaagtgctacttatttgagtaagcattttagttctcataactcctctctcaagtaggtgctgctattactttcatttcacagatgaggacattgaggtttggagagacttagtaacttgtcctctgtcctacagcagagctgggatttgaatctatctgtccaaatctggaacccatttgcttgcacagaaagcttaattgcttgtcccagcaagatagaaagcctgggagtggaagaaatattcagtggctgtgatgtctgagcccacaggcagggtggagagctagggctggggcccttggacgtggggaagaaagggctgagtcttccattttcaatgtgaagtgttgatatctggtgatattgatctaggtccaaaggtgaagaacttaaacccgaagaaattcagcattcatgaccaggatcacaaagtactggtcctggactctgggaatctcatagcagttccagataaaaactacatacgcccaggtgactctcagttttggctgtgttttctgcctccacctagcaggggtaaggcctcctgctaggtgggctcaactccatgctataccatgccccatctccagcaggtggtggaagcgaggaggagaggccccagggactagggcatcagatgaagggtctctagcaatgaccagatctgaaagtagtctttctggaagggctggagaaaaagaaggaggcagacacttagactggaagaagaggaggcttaaaccggtgtgatggagggagaagtggaccacagagtcaagggagagggactgtgcatcaggcctgaaaccccagcagacaggagagacctttccctgctctcagaacccacacatgttctgactgtctttttccagagatcttctttgcattagcctcatccttgagctcagcctctgcggagaaaggaagtccgattctcctgggggtctctaaaggggagttttgtctctactgtgacaaggataaaggacaaagtcatccatcccttcagctgaaggtgagagttctagctcagtttcctgggcctttggctaccccaaagtaaaaggccaagatcctcaatgcctctcgctttcctgcaaattcttatcttggccaatataacagggacatccacctttctggaagcaccaggcagaagagccccataacttcttctctggttccttgccccttctagggaaggaggagagactcctcacagcggggagacagcaaggagctgagcacctgttctcctctcctgggctcactggtcctggccctgggcgggtggcggtcccctcctgctgtggccctccatgtggcaagcaacacaattgggccaggaccctggcgtgctgctgtagggtaggagggtgtgagggagcactcggagggcagtgtgtctgccctgcaaatttagtcctggatggagcatcctttcacttgaggggagaaatcttaggaagctgaattagatacagatctaagccatattctctaattttaaaaactatagagctgagattttggtatccatctgactcttacgtctctctctctctctctctctctctcagtttatttttaatctgggggacaagaaggcctggaaaagagggcatgattgcttatcatcccttaaataccagtaccaaggctgacacgtcatctttcccaaggaccatctgccttctctcttttcctcctctcctgtgtaaaggcctggaggatgagcacatgtgctgtgttttcctccctctcaaagcctgtgctatctaattaatcccttttacctcacagaaggagaaactgatgaagctggctgcccaaaaggaatcagcacgccggcccttcatcttttatagggctcaggtgggctcctggaacatgctggagtcggcggctcaccccggatggttcatctgcacctcctgcaattgtaatgagcctgttggggtgacagataaatttgagaacaggaaacacattgaattttcatttcaaccagtttgcaaagctgaaatgagccccagtgaggtcagcgattaggaaactgccccattgaacgccttcctcgctaatttgaactaattgtataaaaacaccaaacctgctcactaaactttctgtcattgggtttcatttctcattcatgctttaaggatttgtgtttttaggatatagcaagaagcttgtttaattacaaagttctgggttggaaagagaccggcttctgcttgtgtactgctaccctgaaccatcagacatgcatgtgtgtgtcatatgctatgatgtggccagtctgagtgcaatacttgcagcgggaaggagcagctgggtgcatgctgtgctctagaattagtctttcctactggggtttggtagattctgagggcattgatcctggggcagaagtggctgagtctgtgtctagggtacagtgtgcaagaaagaaatgtaacagcaagtcacaatccagccaagtgatagtggaaaaggggtagttaggtcccagataaggagcagggtgacttgacctgtgggaaaggcacagagacaaggaatctgggtcagatgacagccaggagaccaggtgagggaggagccaggtactgtctgggaggcttgtcaacaagggcatggtcctatcactaagcagggctcagatcctcataatgggggagtggaaggctggccgaacagaaatcagggcctggaaacagagtgagggggtggagacaggagactgaggcttggaaattagtttattagttttagctcttcagttacaagcaataataatagcttctagcttatttaagcaacaagtatactacaaaaggagctttctagaaggatattgggtatattcatttcttactgctgctgtaacaaattaccaccaacttagtggtttaaacaatgcaatgtattatcttgcagttatggaggtcagtctggaatgtgtctcactgggccaaaatcaaagtatcagcaggatagcattgctttgggaggctctaggggagagtcaatttccttgccttttccagcttccagaggccacctgcattccttggctagtggcccactcccatcttcgctgcttgggtttttctcacactgctttgctctgaccctcctgccttcctctttcacatataagaacgcttgcaatttacatcgggctcacgtcaatatccaggatactctcccgtctcaaagaggcttaactttaatcacagatgcaaagtcccttttgctatgtcatgtaacatatacacagggtctggggattagaatgtggacattttcggggtgccattattctgcctatcatgtgaagtaactttcaaaatggaaagacatgctgaagaaaaagtcagggatttctggcaggccagaaatgacagaaggcagaaaacgttggtcccatcactcagatgggtaagagccaatcatgctttttgtcagttagcaaaagattgagattccaagcaaagcatgcaactgccctagtttgggtcatgtgtcgactccttggtcagtgaagggcagcacaccttgatcaatactccctccaagactgtatccaacgaggccagtgatgttcctcaaagcagagctagagagctaatcccaggagagaggcgtgtgggtggtgggcaggaagacaaagctcagccgtaaaggagtagtagggacagcaccctaggcatggaggctcaagtgagatgatacccatgggaaaagctctgataaggtcagctccttctgtttctgatcctgatggtgatggtgatcaacaccagcccagtgacaaaaaagtacatagtatatttagtagatgtttcccacacagagaaatggtaaatattcaaggcgaggaatactccaaacatcctaccttgatcattacacattccgtgcatgtaatgagtacttgcatgtatgccataaatatgtgaaatattatgtatcactatataaaagaaaaaaaaatgtggccaggtgacatccatattttggagaggaaggcatgtcttcttcataatatcacaaaactattttcacaacaaagacacagctgttcaaattagtctctgagccggggctgtctcatggcagtgaggactctggttcccttacagactagcagaaaggagatggggcttactgaccatggccttgaggaggctgaacatgcaggccaaatggagacacagacagcctgggcttggtcctgctccatccccttccaacctgatgagatatagtgagtcactatgacgtgggtcactcatgcttcctgtgaggctccaccaagacagcaagtgcatcaacaccttacggaagcacaaggccctgtttgttgttgacttcatgaaaggcatggttgtggtgatcgcattgagtaggcttttgggtgagaggtgaaaaaccccaactatcatgcattgcagccctctggtggaaactgtgcttcaggctctaaatttcaggctctagactgactccaggatgagtatttggaagctgaagtcaatctgtggtctcttctcctgtagagcaggagtcagcacttttcatagagtgccagattctatatatcctgccacatgctctgttgttacagaacaaagaaggccatagacagcatggctgtgttggcaaatacacaaaacaggcaataagctgtatttggcctttaggctgcagtttgccaacccctgcactaacacagagcttaaaggtggtggtggtgtgctggagctagcttatatcagcttgcaatagccaattgctaacatctcttccaaactctgtgtctgtgccttgatgttgatagtttgaaattggctaccccatttaatgctgcaatcttttctcaccccagcactactgactcccctttgccctgtcttatttttctcactctaacatgctgtatagttttcttcttacatttattgtttgtgtcttccactagcatgtatgtcccacaagttctttgctctgtgatgtatcccaagaacccactgcagtgcttggcacttgtaggaactccataagatttttataaatgaagaaaggaagaaaaaagagagggagggaaaaaggaaaggaagccttctatttaaatgatggccttctccatatttctatagtaatatgacttcccttgcaaagggggatgcattttggaaaatgtgtataaataaactcaggtggttttgaatttcattttcctaactgtaattgtaatcattggtctttatgtttagtgaaaaagttttggcccttatgcctcacacctgagaatcccaaagtattggtttgttagagctcccatagagaaccataaactgggtggcttaaaacaacagaaatgtatcgtctcctggttcaggaggccaaagtctgaactccaggtgttggttcattctgagagctctgagagagaatctgttccaggcttcccttcagtttgtggtagctccagggttccttggctggtggcagcaaaactccagtctctgcccccatcttcacatgactgtcttctctctgtgtttctgtgtccagattgtcctataaggacagagtcatactgaattagggctcactcgaatgacttcatcttaagttgaactgtatctgtaaagaccttatttccaagtaaggtcacattcacagctactgggggataggacctcaacatatctttttgggggacataattcaactcataatacccaacatgataactgttcatcccatgaaatttaatgtctctcaaaaggtgatctcagggcatttaatctgtgacagaaactcccataggaaacattccaaccagaagctcctttcacagctggtcactcctcctaccccatccgaggtcctggggcagggtgaggcaggtggggacaagaagaaggctgtctcgggtgtagaaagagaagacccttattcacccggcactctgttcatgaatgagctatccagcataggatataataaatcgctttaggagtggtagactccaaacatttttttggtcccagttatcctaatcaattaaacaaactctagaacccatcttgaagtgcaggcattgggacattatgaaacttacacagaattcaaaaatttacaagggctaaataaaacagggtctgacatctaatattttcttcccacattcccatgcactgtctggctcaaccatccccaaccctcactctcatcctggtggacacatgcctagtgatgtgatcagctggttcacagggggctggtgatggtggatatacagcttttgccaatttccatggcataactactccaaatatggccaatttcaaactaccaacatgaaggcacagacacagagtttggaagagatgttagcaattggctattgcaagctgatataagctagctccagcacagcaccaccgctacctttaagctccttgtgttagtgcaagggttggcaaactgcagcctaaaggccaaatacagcttactgcctgttttgtgtatttgccaacacagccatgctgtctatggccttctttgttctgtaacaacagagcatgtggcaggatatatagaatctggcagtctttaataagtgctgactcctgctctacaggagaacacagattgtcttcagcttccaaacattcatctctgagtcagtctagagcctgaaatttagactgaagcacagtttccaccagagggctgcaatgcatgatagttggggttttcacctctcacccaaaagcctactcaattttttactgcaaaaacatgttatcatcattattttttacttagcccacctttccttggcaattttccataggaaaatgcattctaaatttcaactaatcaggggacttggagcctctggacacccccttgttccttgcccacagtcccttgcagaaggtgccttatcagagcggctccatgcaggggctcaggacaggatcagatgtcagttgcaccaagggggcagggacagatcctctctgctgaccatgcagaagggactgttcagtgcaccgtcatggtcctggtgatttctggtccataagggaattttcacatgcatcgggtgattgtcacatcagcacaacactgtgaggaaggcagagtgagaatttgtgtgcccattttataggtgagaaaacagatgcagagacattaagtaacttcaccacagtcatgcgggttttaagtggcagactttcaggtgttgtgactcctagtccagagttctttgcactgcccctgaggtgctaaaactctactgtgctttaagactcacttggggagcttcctaaaaagagagattgcacaacctgagattcttgtttaactgttttgggatgtagctcagggatctagctgccttaaaaaaaaaaactcccaagtaattctgatgcaagcggttcttttttgtccacctttgaagaaacactgcctcctccccatacatttcattagaaaatggtaacatgtttttcagcctgagagccatttctgggtgaccggacgtcggcagcccgctgtactagctttcagtctaggcttaaacacacatgataggagatgtcctactccagatgatatgagtctgaaccatggaaaaattccattgtgtggcacatctggtgggtgtgcactgtccccagcagtgaggcacccagtgaagacagcagctgggagaggcttagttacatgcagtgggacagtgtgggctagactgctgagccctctgcagtttactctgtgtcaggcaatgagggtgaaaggctgatcagacccacgtgcagaccataccctccagggagacagatatcagtcaggacaaccccaagtgtagctggagaagcagtgcccaggtatgaccggatgtgtatccaaccaggaaatctgcatataaatataagaggagaaaatgaacagatgttgctcttatatgtagatatttatgaagagcatataattttgttttgtgtgttttaagaagtttataagtatgccttaaaaatgtatagtatatactgtaggtattttttccattagatattttgtttttcatacttatccacattgacattgtagcaacagtataatataacaacctcctctacaaaagcagaaggaagtgaagctttggaaggaagcacccagtgagcttgcccctttcaggtgggtgcagtgagcaggagtcagtgaggttgagatcctttgagaggaggcaatcattaaccaggaaatctgcactgcatcctggccacacctaacccttggacaatggtgcttggagcgccttccagctcttaaggcttgcgatttctttctctcactcttcacccacgatgattaaatcttctcctacagagttggacaataaagccttgagttcctgcctcccctggtgtgatcacgaggcatagacatggccaggaacatgtaggtgtctttgaaagctgaacaagttagtaaatttcaaacctcatttcacccaccagtaaaatgggaataataataaacctattttacatagggttgacaagaggagtaaagagggattcaatgaaagttcgttattatcatttgtagtagcagtgttgataatatcaactgaaagttcattatcattattagtagcagtattgataaccctcttttctgtgccttctcactggtgggcccaggccatcagcaatgcccagggtgtcatggatctctgctgcatcgggcaccagctgtgtcaatggtgagaacagtacaagggtgggcagggcaaggcaggaagcacccaggagcagcagcttcatggggtgaagatgtcaggagcttagggacagtcagagcgggtgtgcctcctcttgtggagcctttctgcgtgggtaggaactgctgcagctgtggccatggattcacctgaatatgggtggaattaggcattcagctgggttagctgtgcctagaaggaggaactctaaactgagaacttgtccctattgccacctctgataggcagatgatccatccatcagtggctgagctgaggtgtgcatggggatgggtaagagcccacacacagggctgatgactgagtctatttagaacaatagatgtaaaatctgataatgtaaaatgtgatagattattttgtcaattagaaatggtaccatataattatatatatacataaacatgtatacatatacacacatatacatgtgtgtataaacacacacagtattgtcccctactcattccataaacctgatgcctttagctgggattcccagctttcactctcctctctgtcatctgctgtctatatcctccccatcctgtaattctggcttatatgccacttcctccctaaagccctccctcaatcccttgctggaagtgacattttcctctttgagctgcccctgcttgtgctttggtgaggtcagctgtattgcagtaccttgtattgtggttgtcacatcatcgtatagaattaatttctgacacattccgtatttttcaaagggcctagtgtggggctttaacagtaactacgccaccacgcccagttaattttttgtatttttggtggagacaaggtttcaccatgttggccgggctggtttcgaactcctgacttcaggtgatctgtctgcctcagcctcctggagtgctaggattgcaggcatgagccactgcacccagccacctatcaaaattttaagtgccatttttattttttattttttgtagaaatggacaagctgatcgcaaaattcacatggaattgcaggaggttccaaatagccaaaacaatcttgaaaaagaagaacaaagttggaggatttacactttccagtttcaagacttagctcttagctacaaagctacagtaatcagaacactatggtcctggcataagtgatgctggacaggtgagccccaaagtgggacttaacctgtgaaggttcttggccttgcccaggaaggaattcaagggcaagccaatgggacaagaaaacagctttattgaaggggcagtattacagctccagccctgttacagctccagccctgttacaactctgactactcctgcacagaagggctaccctgtaggcagagagtagcaactcagggcagttttgcagtcatttatatccacttttaacacatgcagattaagggacaatttatgcagaaatttctacggaattggtaataacttttgggtcatggagtcatcatggaaggggggcggggaactccctggtgttgccatgatgacggtaaactgatatggcgaactggtgggtatgtcacatgaaaagctccttccaccccagccctgtttcaattagtcctcggtttggtccagtgtccaagtcctgcctccagagtcaagtcccaccccctacctcttaaggagagatgtaaatacatggaatagaattgagagtccagaaataatctcatacatctatgatcaattgattttcagcaaaggtgccaagaccattcaatgagggaaagaatcatatttttttcaacaaatggtgctggataaccacatgtgaaagaatgcaactgggcccttatctcacaccatatacagaaattaactcaaaatggctcaaacacttacatgtaagagctaaaactataatattcttagaagaaaacagggatatatctttatgaccttggatttgctggctgattcttaaatgacactgaaagcacaagcaacaaaagaaaaaaaaataggtaaattggacctcatcaaaatttaaaacttttatgctgggtgcacacctgtaatcccagcactttgggaggctgaggcaggaggatctcttgagcccaagaagctgaggctacagtgagccgaaattgtgccactgcactccagcctgggtgacagagcaagaccctgtctcgaataaataaataaacaaatatataattatagatctctggatcttgccttcggagactgactcaactaactggtctgggtgggagcccagccatttgtattttttgaaaactctccaaatgattttactgtgcagccaaggttgagaatcactgtatcatagggttggactcctaactggaaacagtttgcaccatcaggtgtcgcagcattctgataatagttaagctttcctcctagattttctgatattagatgagtcatgtttacaagtttttaccaagagacaaactatctttctgcccttactttctctcttatactattctaatcccagaaccctttggaacttccactgagagatgaatctagaaagtgactctcttggctacaacagagagtaatgttggcctgtttgtgccagatccagttggtgctggtggtgggacagcacctccctgaaatcccctcctctcccgtcagattcagtcccccatttgcatcacgtacaatcatcactatgggtttctattaccttgctagggcatttggaggtaccatatataccaactattagttttgagccatggttcccaaagtgtggactgtagggcacctcagcacactcacgaggtgtcatgggatatttaaatattctgaagaaaacacagtgacatctgtcaggcccgtgaaaaccgttggcattaaattgtctcaacccaattgcttaagaagcagaactggccaggcacggtggctcacatctgtaatcccagcactttgggaggccgaggcgggcagatcacgaggtcaggagttcgagaccagcctgaccaacatagtgaaaccccgtctctactaaaaatataaaaattagccatgcatggtggcatgcacctgtaaccccagctactcaggaggctgaggcaggagaattgcttgaacctgggaagcggaggttgtagtgagccaaaatcgtgccactgcactccagcttgggtgatagtgagactacatctcaaaaaaaaaaaaatgagagagagagagagaagcagaaccatcaggtgtttcttttggcttaaagtactctgtgaagaaattcctgggacacgaaggataccatgaactgagagattttgggaacctctgctttagaagctggaggtagcattccttgggcacagtactgccttgggatcagcaaatccttttgatggtgcatttaggtgtggcaagacagctcttagagtgggaccgggatgtgcttggagacagagggaactagattgagctgcccgataaagacatgccagcctggcagagtgtagtgactcatgtctgtaatcctagtgctttgggaggctgaagtgggaggattgcttgaggccaggggtttgagatcagcctgggaaacaacaagacctctacaaaaaaaaaagaaaaaaaaaattaaccacatgtggtggcatgcacctgtagtcccagctacctggcaggctgaggtaggaggatcacttgagcccaggaaggtaaggatacattgagccatgactgtgccactgcactctagcctgggtgacagaaagagactctgtctcagaaataaattaaataaataaataaatatatagtggccatgacatccctagaaagacaaggtcctgggaataggtagaagccaagggaaatgagaaatgagagggggccctggagctggaactgggggagcaggatggcctctgagaagttcctgatagtggtgtcactgatgtgtctgatgtttagttgtaattatttgctgggcccctgtcatccctcatatctgatagctctttgctagtcaaagtgtggtctggggatcagcggcatcagcatcacttgagaacttgttagagatgcagaatctagagccccacccgggacccagaaacagagcctgcattttaacaagctccccaggtgattctcacacacactcgcatttgagaagcactgggctagttgacagattctcaggcatggctgacattgaaatatccagggagcaggcttggcattaggatgtttaaaagtcctccaggtgtttctaaagccaggtttgaggaattactgggctgatacaaatgttttgtgatgatgctttgtgtgtgtgtgtgtgtgtgtgtgtgtgtgtgtgtgtgtgtgtgtgtgtgtgtgtagggaattctgggtcacttggcaccaacacaggaaacaatggaaatatgtgagccatgacagaaaggtcaggagataaaagaaattagtgacatgagaggtactcctcaggtgttaggaaagagggtagagcaaaccaggttttccaccatatgttggatagggggtcaagtaaatttctacttaaaaattacaaacaggggctgggcgcggtggctcatgcctgtaatcccgcactttgggaggctgaggagggcggatcacaaggtcaagagattgagaccatcctggccaacacggtgaaaccgtgtctccactaaaaatacaaaaattagctgggcatggtggtgcgtgcctttattcccagctactcgggaggctgaggcaggagaatcgcttgaacctgggaggtggaggttgcagtgggccgagatcgcaccactgcaatccagagcgagactgtgtcaaaaaaaaaaaaaaaaagaaaattccaaacaggatgaccctaagcctgcaggacttggagacatctaggtgactgatactcagtcacaaaacataattggtcacaggcctgatgaaatgcacagcagaccttcagatggtatgcactcaagtgatatccacaagtccacctaaagaaatgctatattcagacatttggcatcaatctctatcaaacaaagatagtccaaagcaatgggttccaaaaacactttcctaagacaaattctctatttgcttttaatatcagtcatcccagcccttggaatagaggagcaaatgataccagtggtaccctaccacaatgcaccaaggtattatactctcatgctccattttctccctctgtctacatcactaataactcattgatttctggtgcaagccctgctgggagaaaaagtctactcttgtaccttggagcaagttgctcagagtaggtatcgaggataaaatttggaaagttagaaaagctattagaaggagatcctagtagttgaaaacacagcctggccaagtcaatgatgctatttcatctccccagccttgcatgtccatagctaaggaagacaatttaggcttgggctagaggatgggaaagggcaaaattactgatgccacagcccagagaggtattctagtaatctgagggtgaggaccacatacctggttcagggacgtacagtgttgacagctgtgagtggatgcctggagttctggcgtgtcttctagcacaatgatacctgagactcttgcatcattgggaataataaaatgggagtggatagatatgaaattatgatggcaataagcaatcagctaatagcttcattgatgggacagattaaagatggctgcaaatcctttggtccaggtttgggatataggcagcatttgtattggaatgctgatagtctgaggccatgaaaagtccacctgcagtagtggtaggaggaacaagcctcactttcttcaatgtgtgtgactgctgtcttgattccctgggtggccagttccattcgtgtggttctttggtccacttgactctggggtggctctgtgatggcttgaccaatacaatgtagtggaaatgatgctgtcatcatttccagcctcttccagccttaaggaactggcaacttttatttctgtcccttggaatacttgttcttgcaacccatccatcatacagtgagaaattctaagctgccccattaagaggcccacatggtgataaattggggtcttacatacagccctagctgtgctcctagctgacaaacagtagcaacttgtcaccaggcgagtgaaccacttaggactgtatactccagccccagttgagcaatgtggaacagagtaaaccatctcagcttagccctgcccaaactgcagaattatgagcaaaataatcccctaggctttgggctgatttgttccagattactggaacagaatttggtaccaggggtgaggtgctacagcaatgaaagcttaagacacgtgactttggttttgggtctgagtggcaggggaacttggcaggcctcaaggaaacttttagggagggttgaagcatagtgaggaaaacagtaggggaagctagaggaaaaaatgatgcttggtatgtagtggtgggaagtttagcaaaactcgcctgatgtaatgtgggaaattgtaagaactcagaacgatttaagggcatgttttataggtcctttaagaaacttctaggccaggcgcagtggctcatgtctgtaatcccagcactttgggaggctgaggtgggcggatcacaaggtcaggagatcgagacaatcctggctaacattgtgaaaccccgtctctactaaaactacaaaaaaaaattagccgggcatggtggcgggtgcctgtagtcccagctactagggaggctgaggcagaagaatggcgtgaacctgggatgtggatcttgaagtgagcccagattgtgccactgcactccagcctgggcaacagagtgagactccgtctcaaaccgaaaaaaaaaaaaaaaaaaagaaacttctagggctggtcccgtggaagcctcacacatggtacacaaaggctgtcttgaaaagaaacgtaagtgtgttttttggtttaataaaattgattataaatggataatgcaaaacattttaaagaattttactagcttacattagcagatttggatccagtgattgttacattctggtactgagcccctgaattacttctttgagtaaggcattataccaaagctattgatagttgggcttatagggtgtatgtttgaagaactactaatgtcaaaaccaatatttcacggtcgacaagaggacatcagaactggtaatccttattaccatgactggctggacagaatactcaatgtaatgggatttcctgcaaataaagacggggaagatgtaaaaaagatgcctgaacattcaacattaatgaaagatttcagaagaaatatgtatactaactgcagccttatcaagtatatggaaaaacacaaagttaaaccagatagtaaagcattccacttgcttcagaagtttcttactatggacccaataaagtgaattacctgagaacggggtccctgtttcttcgaagacccacttcctacatcagacgttttcaacagttgtcaaatcccctacccaaaatgagaatttttaacagaagaagaacctgatgacaaaggagccaaaaagaaccaccaccggcagcagggccataaccacacgaatggaactggccacccaggaatcaagacaacggtcacacacagggacccccgttgaagaaagtgaggcttgttcctcctaccactacctcaggtggacttttcacggcctcagactatccgcgttccaatccacatgctgcctatatcccaaccctggaccaagcacatcccagccgaagagcagtgtaggatactcagctacctcccagcaggctccacaggacccacgtcagacacacgggtactgagctgcatcggaatcttgtccgtgcactgttgtgaatgctgcagggctgactgtgcagctctccgtgggaacctggtatgggccatgagaatgtactgtacaaccacacctgcccagtagccaagttccttccaccgcttttcacagatcggggtagtggcttccagtttgtacctattttggagttagacctgaaaagaaagcgctagcacagtttgtgttgtggatttgctactttcatagttaacttgacctggctcagactgaccagtacttttttttccgtgacagtctatagcagttgaagctgagaatgtgctaggggcaagcgtttgtcttcatatgtcatgaattcctccagtgtaacaacattatctgaccaatagtacacacacagacacaaggtttaactggtacttgaaaacatacagtaggtgttaactcagtgaaataaccaggactcaaagtaagattattttggtacacctttcttgttagtgtcttatcagtgagttgattcattttctacattaatcagtgttttctgaccaagaatattgcttggatttttctgaaagtacaaaaagccacatagtttttttcagaaaggtttcaaaactcctaaagattaatttccaagtataagtttgtttttattttcaatctatgacttgactggtattaaagctgctatttgatagtaattagatatattctcattgatataaacctgtttggttcagcaaacaaactaaaatgattgtcacagacaatgctttatttttcctgttggtgttgcttgtgggaaaaagaaagagagatcagattgttactgtgtctgtgtagaaagaagtagacataggagactccattttgttctgtactaagaaaaattcttctgccttgagatgctgttaatctatataaccttacccccaaccctgtgctctctgaaacatgtgctgtgtccactcagggttaaatggattaagggcggtgcaagatgtgctttgttaaacagatgcttgaaggcagcatgctcgtaagagtcatcaccactccctaatctcaagtacccagggacacaaacactgctgaaggccgcagggacctctgcctaggaaagccaggtattgtccaaggtttctccccatgtgatagtctgaaatatggcctcgtgggaggggaaagacctgaccgtcccccagcccgacacccgtaaagggtctgtgctgaggaggattagtatacgaggaaggaacgcctctttgcagttgagacaagaggaaggcatctgtcttctgcccgtccctgggcaatggaatgtctcggtataaaacccgattttatgttccatctactgagataggggaaaaccaccttagggctggaggtgggacatgcggcagcaatactgctctttaagacattgagatgtttatgtgtatgcatatctaaagcacagcacttaattctttaccttgtctatgttgcagagacctttgttcacgtgtttatctgctgaccttctctccactattatcctatgaccctgccacatccccctctccgagaaacacccaagaatgatcaataaatactaagggaactcagaggccggcgggatcctccatatactgaacgcttgtcccctgggcccccttatttctttctctatacttggtctctgtgtctttttcttttccaagtctctcgttccacctaatgagaaacacccacaggtgtaaaggggcaacccaccccttcattgctgatttgtgagcgtgctttaaggtgaaaaaagcatgaatgttaacttccttaaaaaggtacagcatccaattcaaatatttttgtcctgattttaatgctagttgatgtagtgctattaaaattttgttcaacatggacacagagaggggaacaacacataccagggcctgttgcggggtggggatgaggggagggaacttagaggacaggtgaacaggtgcagcagatcaccatggcccacatatacctatttaacaaacctgcacgttctgcacacgtatcccatttctttttttttttaagaaatagaaaaaaaaataaaattttgttcactgattcttccattttaaaacttgtttgcatgtggtttaggatgcccttacttcagcaaaggagaaggaataggagggccttagaatttttgagggaaaaaaaccctataacatacattgtactgtatcaaactattttacatgaatgacacaagtattctgaataaaaaaataattgaacattgttaagaacaaggtgtcatgtaatttatttttcataaataaaaaaattatagtggcttagactgaaaggaacagagaatttaaaaaattaaaaagaagccttagtatatttttgtatatagtttccatgtgccatatttgccataattggatgagaattttttgacctctggcagggtgaccctatattttcantntataaagcgtgcatcatacc

SEQ ID NO: 88 - protein, 185 aa, Artificial Sequence
  Synthetically generated
  VARIANT (1)..(185): Xaa = Any Amino Acid
MVLKCHPPGDSQCAPGVRVTALGHATQRVSSDQQHPQLWECIRKTEAWHHPHLLNHSLQPGGPCSLSNKCLSSLQRSASAEKGSPILLGVSKGEFCLYCDKDKGQSHPSLQLKEKLMKLAAQKESARRPFIFYRAQVGSWNMLESAAHPGWFICTSCNCNEPVGIXNXVDFDLLGKAQKRGTGSE

SEQ ID NO: 89 - DNA, 746 bp, Mus sp.
  CDS (135)..(428)
gaattcggcacgagggtagtgtgcagacacattcctattcaatcagggtcaatctgcagattggcagctcagaaacaacatcaccataatgaataaggagaaagaactaagagcagcatcaccttcgcttagacatgttcaggatcttagtagtcgtgtgtggatcctgcagaacaatatcctcactgcagtcccaaggaaagagcaaacagttccaggaagggaacataatggaaatgtacaacaaaaaggaacctgtaaaagcctctctcttctatcacaagaagagtggtacaacctctacatttgagtctgcagccttccctggttggttcatcgctgtctgctctaaagggagctgcccactcattctgacccaagaactgggggaaatcttcatcactgacttcgagatgattgtggtacattaaggtttttagacacattgctctgtggcactctctcaagatttcttggattctaacaagaagcaatcaaagacacccctaacaaaatggaagactgaaaagaaagctgagccctccctgggctgtttttccttggtggtgaatcagatgaagaacatcttaccatgttttcatccaaagcatttactgttggtttttacaaggagtgaattttttaaaataaaatcatttatctcataaaaaaaaaaaaaaaaaaaaaaaaaaaaaaaaaaaaaaaaaaaaaaaaaaaaaaaaaaaaaaaaaaactctcgcggccgc

SEQ ID NO: 90 - protein, 98 aa, Mus sp.
MFRILVVVCGSCRTISSLQSQGKSKQFQEGNIMEMYNKKEPVKASLFYHKKSGTTSTFESAAFPGWFIAVCSKGSCPLILTQELGEIFITDFEMIVVH

SEQ ID NO: 91 - DNA, 294 bp, Mus sp.
  CDS (1)..(294)
atgttcaggatcttagtagtcgtgtgtggatcctgcagaacaatatcctcactgcagtcccaaggaaagagcaaacagttccaggaagggaacataatggaaatgtacaacaaaaaggaacctgtaaaagcctctctcttctatcacaagaagagtggtacaacctctacatttgagtctgcagccttccctggttggttcatcgctgtctgctctaaagggagctgcccactcattctgacccaagaactgggggaaatcttcatcactgacttcgagatgattgtggtacat

SEQ ID NO: 92 - protein, 98 aa, Mus sp.; identical to SEQ ID NO: 90

SEQ ID NO: 93 - DNA, 243 bp, Mus sp.
  CDS (1)..(243)
ctgcagtcccaaggaaagagcaaacagttccaggaagggaacataatggaaatgtacaacaaaaaggaacctgtaaaagcctctctcttctatcacaagaagagtggtacaacctctacatttgagtctgcagccttccctggttggttcatcgctgtctgctctaaagggagctgcccactcattctgacccaagaactgggggaaatcttcatcactgacttcgagatgattgtggtacat

SEQ ID NO: 94 - protein, 81 aa, Mus sp.
LQSQGKSKQFQEGNIMEMYNKKEPVKASLFYHKKSGTTSTFESAAFPGWFIAVCSKGSCPLILTQELGEIFITDFEMIVVH

SEQ ID NO: 95 - protein, 35 aa, Artificial Sequence
  Consensus Motif
  VARIANT (1)..(35): Xaa = Any Amino Acid
  VARIANT (2)..(2): Xaa = any amino acid
  VARIANT (5)..(6): Xaa = any amino acid
  VARIANT (8)..(14): Xaa = any amino acid
  VARIANT (15)..(34): Xaa = no amino acid or any amino acid
FXSAXXPXXXXXXXXXXXXXXXXXXXXXXXXXXXL

SEQ ID NO: 96 - protein, 35 aa, Artificial Sequence; identical to SEQ ID NO: 95
  Consensus Motif
  VARIANT (2)..(2): Xaa = T or E
  VARIANT (5)..(5): Xaa = A or E
  VARIANT (6)..(6): Xaa = any amino acid
  VARIANT (8)..(8): Xaa = any amino acid
  VARIANT (9)..(9): Xaa = W or L
  VARIANT (10)..(14): Xaa = any amino acid
  VARIANT (15)..(34): Xaa = no amino acid or any amino acid

SEQ ID NO: 97 - DNA, 33 bp, Artificial Sequence
  Synthetic construct
aaaaaagaattcgccaccatgttcaggatctta

SEQ ID NO: 98 - DNA, 54 bp, Artificial Sequence
  Synthetic construct
tcctctgtcgactcacttgtcgtcgtcgtccttgtagtcatgtaccacaatcat

SEQ ID NO: 99 - protein, 178 aa, Mus Musculus
MEICWGPYSHLISLLLILLFHSEAACRPSGKRPCKMQAFRIWDTNQKTFYLRNNQLIAGYLQGPNIKLEEKIDMVPIDLHSVFLGIHGGKLCLSCAKSGDDIKLQLEEVNITDLSKNKEEDKRFTFIRSEKGPTTSFESAACPGWFLCTTLEADRPVSLTNTPEEPLIVTKFYFQEDQ

SEQ ID NO: 100 - protein, 270 aa, Mus Musculus
MAKVPDLFEDLKNCYSENEDYSSAIDHLSLNQKSFYDASYGSLHETCTDQFVSLRTSETSKMSNFTFKESRVTVSATSSNGKILKKRRLSFSETFTEDDLQSITHDLEETIQPRSAPYTYQSDLRYKLMKLVRQKFVMNDSLNQTIYQDVDKHYLSTTWLNDLQQEVKFDMYAYSSGGDDSKYPVTLKISDSQLFVSAQGEDQPVLLKELPETPKLITGSETDLIFFWKSINSKNYFTSAAYPELFIATKEQSRVHLARGLPSMTDFQIS

SEQ ID NO: 101 - protein, 269 aa, Mus Musculus
MATVPELNCEMPPFDSDENDLFFEVDGPQKMKGCFQTFDLGCPDESIQLQISQQHINKSFRQAVSLIVAVEKLWQLPVSFPWTFQDEDMSTFFSFIFEEEPILCDSWDDDDNLLVCDVPIRQLHYRLRDEQQKSLVLSDPYELKALHLNGQNINQQVIFSMSFVQGEPSNDKIPVALGLKGKNLYLSCVMKDGTPTLQLESVDPKQYPKKKMEKRFVFNKIEVKSKVEFESAEFPNWYISTSQAEHKPVFLGNNSGQDIIDFTMESVSS

SEQ ID NO: 102 - DNA, 1291 bp, Homo Sapiens
  CDS (124)..(630)
aggagtcgacccacgcgtccgattagaacccatcactgaccttggaagctgctggagccacgattcagtcccctggactgtagataaagaccctttcttgccaggtgctgagacaaccacactatgagaggcactccaggagacgctgatggtggaggaagggccgtctatcaatcaatgtgtaaacctattactgggactattaatgatttgaatcagcaagtgtggacccttcagggtcagaaccttgtggcagttccacgaagtgacagtgtgaccccagtcactgttgctgttatcacatgcaagtatccagaggctcttgagcaaggcagaggggatcccatttatttgggaatccagaatccagaaatgtgtttgtattgtgagaaggttggagaacagcccacattgcagctaaaagagcagaagatcatggatctgtatggccaacccgagcccgtgaaacccttccttttctaccgtgccaagactggtaggacctccacccttgagtctgtggccttcccggactggttcattgcctcctccaagagagaccagcccatcattctgacttcagaacttgggaagtcatacaacactgcctttgaattaaatataaatgactgaactcagcctagaggtggcagcttggtctttgtcttaaagtttctggttcccaatgtgttttcgtctacattttcttagtgtcattttcacgctggtgctgagacaggagcaaggctgctgttatcatctcattttataatgaagaagaagcaattacttcatagcaactgaagaacaggatgtggcctcagaagcaggagagctgggtggtataaggctgtcctctcaagctggtgctgtgtaggccacaaggcatctgcatgagtgactttaagactcaaagaccaaacactgagctttcttctaggggtgggtatgaagatgcttcagagctcatgcgcgttacccacgatggcatgactagcacagagctgatctctgtttctgttttgctttattccctcttgggatgatatcatccagtctttatatgttgccaatatacctcattgtgtgtaatagaaccttcttagcattaagaccttgtaaacaaaaataattcttgtgttaagttaaatcatttttgtcctaattgtaatgtgtaatcttaaagttaaataaactttgtgtatttatataataataaagctaaaactgatataaaataaagaaagagtaaactgaaaaaaaaaaaaaaaaaaaaaaaaaaggcggccgc

SEQ ID NO: 103 - protein, 169 aa, Homo Sapiens
MRGTPGDADGGGRAVYQSMCKPITGTINDLNQQVWTLQGQNLVAVPRSDSVTPVTVAVITCKYPEALEQGRGDPIYLGIQNPEMCLYCEKVGEQPTLQLKEQKIMDLYGQPEPVKPFLFYRAKTGRTSTLESVAFPDWFIASSKRDQPIILTSELGKSYNTAFELNIND

SEQ ID NO: 104 - DNA, 507 bp, Homo Sapiens
  CDS (1)..(507)
atgagaggcactccaggagacgctgatggtggaggaagggccgtctatcaatcaatgtgtaaacctattactgggactattaatgatttgaatcagcaagtgtggacccttcagggtcagaaccttgtggcagttccacgaagtgacagtgtgaccccagtcactgttgctgttatcacatgcaagtatccagaggctcttgagcaaggcagaggggatcccatttatttgggaatccagaatccagaaatgtgtttgtattgtgagaaggttggagaacagcccacattgcagctaaaagagcagaagatcatggatctgtatggccaacccgagcccgtgaaacccttccttttctaccgtgccaagactggtaggacctccacccttgagtctgtggccttcccggactggttcattgcctcctccaagagagaccagcccatcattctgacttcagaacttgggaagtcatacaacactgcctttgaattaaatataaatgac

SEQ ID NO: 105 - protein, 169 aa, Homo Sapiens; identical to SEQ ID NO: 103

SEQ ID NO: 106 - DNA, 1377 bp, Homo Sapiens
  CDS (98)..(721)
gtcgacccacgcgtccgggaagctgctggagccacgattcagtcccctggactgtagataaagaccctttcttgccaggtgctgagacaaccacactatgagaggcactccaggagacgctgatggtggaggaagggccgtctatcaatcaagtgaatcaaatgctgttgggatggggctctggaggcttaggccctctgcactcacgctatctcctgtggaagccccagccttctctgctcctctctgtacactgcccttcccacctgtgtgtaaacctattactgggactattaatgatttgaatcagcaagtgtggacccttcagggtcagaaccttgtggcagttccacgaagtgacagtgtgaccccagtcactgttgctgttatcacatgcaagtatccagaggctcttgagcaaggcagaggggatcccatttatttgggaatccagaatccagaaatgtgtttgtattgtgagaaggttggagaacagcccacattgcagctaaaagagcagaagatcatggatctgtatggccaacccgagcccgtgaaacccttccttttctaccgtgccaagactggtaggacctccacccttgagtctgtggccttcccggactggttcattgcctcctccaagagagaccagcccatcattctgacttcagaacttgggaagtcatacaacactgcctttgaattaaatataaatgactgaactcagcctagaggtggcagcttggtctttgtcttaaagtttctggttcccaatgtgttttcgtctacattttcttagtgtcattttcacgctggtgctgagacaggagcaaggctgctgttatcatctcattttataatgaagaagaagcaattacttcatagcaactgaagaacaggatgtggcctcagaagcaggagagctgggtggtataaggctgtcctctcaagctggtgctgtgtaggccacaaggcatctgcatgagtgactttaagactcaaagaccaaacactgagctttcttctaggggtgggtatgaagatgcttcagagctcatgcgcgttacccacgatggcatgactagcacagagctgatctctgtttctgttttgctttattccctcttgggatgatatcatccagtctttatatgttgccaatatacctcattgtgtgtaatagaaccttcttagcattaagaccttgtaaacaaaaataattcttgtgttaagttaaatcatttttgtcctaattgtaatgtgtaatcttaaagttaaataaactttgtgtatttatataataataaagctaaaactgatataaaataaagaaagagtaaactgaaaaaaaaaaaaaaaaaaaagggcggccgc

SEQ ID NO: 107 - protein, 208 aa, Homo Sapiens
MRGTPGDADGGGRAVYQSSESNAVGMGLWRLRPSALTLSPVEAPAFSAPLCTLPFPPVCKPITGTINDLNQQVWTLQGQNLVAVPRSDSVTPVTVAVITCKYPEALEQGRGDPIYLGIQNPEMCLYCEKVGEQPTLQLKEQKIMDLYGQPEPVKPFLFYRAKTGRTSTLESVAFPDWFIASSKRDQPIILTSELGKSYNTAFELNIND

SEQ ID NO: 108 - DNA, 624 bp, Homo Sapiens
  CDS (1)..(624)
atgagaggcactccaggagacgctgatggtggaggaagggccgtctatcaatcaagtgaatcaaatgctgttgggatggggctctggaggcttaggccctctgcactcacgctatctcctgtggaagccccagccttctctgctcctctctgtacactgcccttcccacctgtgtgtaaacctattactgggactattaatgatttgaatcagcaagtgtggacccttcagggtcagaaccttgtggcagttccacgaagtgacagtgtgaccccagtcactgttgctgttatcacatgcaagtatccagaggctcttgagcaaggcagaggggatcccatttatttgggaatccagaatccagaaatgtgtttgtattgtgagaaggttggagaacagcccacattgcagctaaaagagcagaagatcatggatctgtatggccaacccgagcccgtgaaacccttccttttctaccgtgccaagactggtaggacctccacccttgagtctgtggccttcccggactggttcattgcctcctccaagagagaccagcccatcattctgacttcagaacttgggaagtcatacaacactgcctttgaattaaatataaatgac

SEQ ID NO: 109 - protein, 208 aa, Homo Sapiens; identical to SEQ ID NO: 107

SEQ ID NO: 110 - protein, 38 aa, Artificial Sequence
  Consensus Motif
  VARIANT (1)..(2): Xaa = any amino acid
  VARIANT (4)..(4): Xaa = Ala, Ser, Leu or Val
  VARIANT (5)..(6): Xaa = any amino acid
  VARIANT (8)..(9): Xaa = any amino acid
  VARIANT (10)..(10): Xaa = Phe, Tyr, Leu, Ile, or Val
  VARIANT (11)..(11): Xaa = Leu or Ile
  misc_feature (12)..(12): Xaa can be any naturally occurring amino acid
  VARIANT (13)..(17): Xaa = any amino acid
  VARIANT (18)..(37): Xaa = no amino acid or any amino acid
  VARIANT (38)..(38): Xaa = Leu, Ile, Val or Met
XXSXXXPXXXXXXXXXXXXXXXXXXXXXXXXXXXXXXX

SEQ ID NO: 111 - protein, 35 aa, Artificial Sequence; identical to SEQ ID NO: 95
  Consensus Motif
  VARIANT (1)..(35): Xaa = Any Amino Acid
  VARIANT (2)..(2): Xaa = Any amino acid
  VARIANT (5)..(6): Xaa = Any amino acid
  VARIANT (8)..(14): Xaa = Any amino acid
  VARIANT (15)..(34): Xaa = no amino acid or any amino acid

SEQ ID NO: 112 - protein, 44 aa, Artificial Sequence
  Consensus Motif
  VARIANT (2)..(3): Xaa = any amino acid
  VARIANT (5)..(6): Xaa = any amino acid
  VARIANT (9)..(10): Xaa = any amino acid
  VARIANT (12)..(14): Xaa = any amino acid
  VARIANT (19)..(20): Xaa = any amino acid
  VARIANT (24)..(25): Xaa = any amino acid
  VARIANT (27)..(27): Xaa = any amino acid
  VARIANT (29)..(29): Xaa = any amino acid
  VARIANT (33)..(33): Xaa = any amino acid
  VARIANT (36)..(36): Xaa = any amino acid
  VARIANT (40)..(40): Xaa = any amino acid
QXXEXXIMXXYXXXEPVKXXLFYXXKXGXTSTXESXAFPXWFIA

SEQ ID NO: 113 - protein, 68 aa, Artificial Sequence
  Consensus Motif
  VARIANT (2)..(3): Xaa = any amino acid
  VARIANT (5)..(6): Xaa = any amino acid
  VARIANT (9)..(10): Xaa = any amino acid
  VARIANT (12)..(14): Xaa = any amino acid
  VARIANT (19)..(20): Xaa = any amino acid
  VARIANT (24)..(25): Xaa = any amino acid
  VARIANT (27)..(27): Xaa = any amino acid
  VARIANT (29)..(29): Xaa = any amino acid
  VARIANT (33)..(33): Xaa = any amino acid
  VARIANT (36)..(36): Xaa = any amino acid
  VARIANT (40)..(40): Xaa = any amino acid
  VARIANT (45)..(49): Xaa = any amino acid
  VARIANT (50)..(50): Xaa = no amino acid or any amino acid
  VARIANT (51)..(51): Xaa = any amino acid
  VARIANT (53)..(53): Xaa = any amino acid
  VARIANT (57)..(57): Xaa = any amino acid
  VARIANT (61)..(64): Xaa = any amino acid
  VARIANT (66)..(66): Xaa = any amino acid
QXXEXXIMXXYXXXEPVKXXLFYXXKXGXTSTXESXAFPXWFIAXXXXXXXPXILTXELGXXXXTXFE

SEQ ID NO: 114 - protein, 35 aa, Artificial Sequence; identical to SEQ ID NO: 95
  Consensus Motif
  VARIANT (2)..(2): Xaa = T or E
  VARIANT (5)..(5): Xaa = A or E
  VARIANT (6)..(6): Xaa = any amino acid
  VARIANT (8)..(8): Xaa = any amino acid
  VARIANT (9)..(9): Xaa = W or L
  VARIANT (10)..(14): Xaa = any amino acid
  VARIANT (15)..(34): Xaa = no amino acid or any amino acid

SEQ ID NO: 115 - DNA, 838 bp, Mus Musculus
  CDS (96)..(575)
cgggtcgacccacgcgtccgctgtagtgtgcagacacattcctattcaatcagggtcaatctgcagattggcagctcagaaacaacatcaccataatgaataaggagaaagaactaagagcagcatcaccttcgcttagacatgttcaggatcttagtagtcgtgtgtggatcctgcagaacaatatcctcactgcagtcccaaggaaagagcaaacagttccagtcactattaccttgctcccatgccaatatctggacactcttgagacgaacaggggggatcccacgtacatgggagtgcaaaggccgatgagctgcctgttctgcacaaaggatggggagcagcctgtgctacagcttggggaagggaacataatggaaatgtacaacaaaaaggaacctgtaaaagcctctctcttctatcacaagaagagtggtacaacctctacatttgagtctgcagccttccctggttggttcatcgctgtctgctctaaagggagctgcccactcattctgacccaagaactgggggaaatcttcatcactgacttcgagatgattgtggtacattaaggtttttagacacattgctctgtggcactctctcaagatttcttggattctaacaagaagcaatcaaagacacccctaacaaaatggaagactgaaaagaaagctgagccctccctgggctgtttttccttggtggtgaatcagatgcagaacatcttaccatgttttcatccaaagcatttactgttggtttttacaaggagtgaattttttaaaataaaatcatttatctcatttgaaaaaaaaaaaaaaaaaagggc

SEQ ID NO: 116 - protein, 160 aa, Mus Musculus
MNKEKELRAASPSLRHVQDLSSRVWILQNNILTAVPRKEQTVPVTITLLPCQYLDTLETNRGDPTYMGVQRPMSCLFCTKDGEQPVLQLGEGNIMEMYNKKEPVKASLFYHKKSGTTSTFESAAFPGWFIAVCSKGSCPLILTQELGEIFITDFEMIVVH

SEQ ID NO: 117 - DNA, 480 bp, Mus Musculus
  CDS (1)..(480)
atgaataaggagaaagaactaagagcagcatcaccttcgcttagacatgttcaggatcttagtagtcgtgtgtggatcctgcagaacaatatcctcactgcagtcccaaggaaagagcaaacagttccagtcactattaccttgctcccatgccaatatctggacactcttgagacgaacaggggggatcccacgtacatgggagtgcaaaggccgatgagctgcctgttctgcacaaaggatggggagcagcctgtgctacagcttggggaagggaacataatggaaatgtacaacaaaaaggaacctgtaaaagcctctctcttctatcacaagaagagtggtacaacctctacatttgagtctgcagccttccctggttggttcatcgctgtctgctctaaagggagctgcccactcattctgacccaagaactgggggaaatcttcatcactgacttcgagatgattgtggtacat

SEQ ID NO: 118 - protein, 160 aa, Mus Musculus; identical to SEQ ID NO: 116

SEQ ID NO: 119 - DNA, 1564 bp, Homo Sapiens
  CDS (97)..(393)
ctggtctcaaactcctgactaatgtggtgaaaccccatctctactaaaaatacaaaaattagccgggcataaccacgccgcgcccctccggtcagcatgaggctcctggcggccgcgctgctcctgctgctgctggcgctgtacaccgcgcgtgtggacgggtccaaatgcaagtgctcccggaagggacccaagatccgctacagcgacgtgaagaagctggaaatgaagccaaagtacccgcactgcgaggagaagatggttatcatcaccaccaagagcgtgtccaggtaccgaggtcaggagcactgcctgcaccccaagctgcagagcaccaagcgcttcatcaagtggtacaacgcctggaacgagaagcgcagggtctacgaagaatagggtgaaaaacctcagaagggaaaactccaaaccagttgggagacttgtgcaaaggactttgcagattaaaaaaaaaaaaaaaaaaagcctttctttctcacaggcataagacacaaattatatattgttatgaagcactttttaccaacggtcagtttttacattttatagctgcgtgcgaaaggcttccagatgggagacccatctctcttgtgctccagacttcatcacaggctgctttttatcaaaaaggggaaaactcatgcctttcctttttaaaaaatgcttttttgtatttgtccatacgtcactatacatctgagctttataagcgcccgggaggaacaatgagcttggtggacacatttcattgcagtgttgctccattcctagcttgggaagcttccgcttagaggtcctggcgcctcggcacagctgccacgggctctcctgggcttatggccggtcacagcctcagtgtgactccacagtggcccctgtagccgggcaagcaggagcaggtctctctgcatctgttctctgaggaactcaagtttggttgccagaaaaatgtgcttcattcccccctggttaatttttacacaccctaggaaacatttccaagatcctgtgatggcgagacaaatgatccttaaagaaggtgtggggtctttcccaacctgaggatttctgaaaggttcacaggttcaatatttaatgcttcagaagcatgtgaggttcccaacactgtcagcaaaaaccttaggagaaaacttaaaaatatatgaatacatgcgcaatacacagctacagacacacattctgttgacaagggaaaaccttcaaagcatgtttctttccctcaccacaacagaacatgcagtactaaagcaatatatttgtgattccccatgtaattcttcaatgttaaacagtgcagtcctctttcgaaagctaagatgaccatgcgccctttcctctgtacatatacccttaagaacgccccctccacacactgccccccagtatatgccgcattgtactgctgtgttatatgctatgtacatgtcagaaaccattagcattgcatgcaggtttcatattctttctaagatggaaagtaataaaatatatttgaaatgtaaaaaaaaaaaaaaaaaaaaaaaaa

SEQ ID NO: 120 - protein, 99 aa, Homo Sapiens
MRLLAAALLLLLLALYTARVDGSKCKCSRKGPKIRYSDVKKLEMKPKYPHCEEKMVIITTKSVSRYRGQEHCLHPKLQSTKRFIKWYNAWNEKRRVYEE

SEQ ID NO: 121 - DNA, 300 bp, Homo Sapiens
  CDS (1)..(297)
atgaggctcctggcggccgcgctgctcctgctgctgctggcgctgtacaccgcgcgtgtggacgggtccaaatgcaagtgctcccggaagggacccaagatccgctacagcgacgtgaagaagctggaaatgaagccaaagtacccgcactgcgaggagaagatggttatcatcaccaccaagagcgtgtccaggtaccgaggtcaggagcactgcctgcaccccaagctgcagagcaccaagcgcttcatcaagtggtacaacgcctggaacgagaagcgcagggtctacgaagaatag

SEQ ID NO: 122 - protein, 99 aa, Homo Sapiens; identical to SEQ ID NO: 120

SEQ ID NO: 123 - DNA, 1656 bp, Mus Musculus
  CDS (212)..(508)
ggagatcgcagcacccagcgccaagcgcagcgcggcaccgcgacagacggcaggagcacccatcgacgggcgtacgtggagcgagccgagcagagcagagagaggcgtgcttgaaaccgagaaccaagccgggcggcatcccccggccgccgcacgcacaggccggcgccctccttgcctccctgctccccaccgcgcccctccggccagcatgaggctcctggcggccgcgctgctcctgctgctcctggcgctgtgcgcctcgcgcgtggacgggtccaagtgtaagtgttcccggaaggggcccaagatccgctacagcgacgtgaagaagctggaaatgaagccaaagtacccacactgcgaggagaagatggttatcgtcaccaccaagagcatgtccaggtaccggggccaggagcactgcctgcaccctaagctgcagagcaccaaacgcttcatcaagtggtacaatgcctggaacgagaagcgcagggtctacgaagaatagggtggacgatcatggaaagaaaaactccaggccagttgagagacttcagcagaggactttgcagattaaaataaaagccctttctttctcacaagcataagacaaattatatattgctatgaagctcttcttaccagggtcagtttttacattttatagctgtgtgtgaaaggcttccagatgtgagatccagctcgcctgcgcaccagacttcattacaagtggctttttgctgggcggttggcggggggcggggggacctcaagcctttcctttttaaaataaggggttttgtatttgtccatatgtcaccacacatctgagctttataagcgcctgggaggaacagtgagcatggttgagaccgttcacagcactactgctccgctccaggcttacaaagcttccgctcagagagcctggcggctctgcgcagctgccacaggctctcctgggcttatgactggtcagagtttcagtgtgactccactgtggcccctgttgcagggcaattgggagcaggtccttctacatctgtgcctagaggaactcagtctacttaccagaaggagcttcatccccaccccacccccacccgcaccccagctcattcccctgtcacgaccaggcaagtgatccttaaaggagctgggtctttttcttgcaaactgagggtttctgaaaggtcccctgctttggtagaagatgcttctgaggcatccaaagtccccagcagtgtgagaaaatgatgctcgatgttcgggaggacaagggaagatgcaggattagatgcaggacacacagccagagctacacatcctcttggcaatgggagctcccccccccaaagctttgtttctttccctcaccccaacagaaagtgcactccccctcagtgaatacgcaaacagcactgttctctgagttaggatgttaggacgatcctgcgccctgccctctcctgtgtacatattgccttcagtacccctcccccaccccatgccacacactgcccctcattagaggccgcactgtatggctgtgtatctgctatgtaaatgctgagacccctgagtgctgcatgcaggtttcatgttctttctaagatgaaaagagaaagtaataaaatatatttgaagttacca

SEQ ID NO: 124 - protein, 99 aa, Mus Musculus
MRLLAAALLLLLLALCASRVDGSKCKCSRKGPKIRYSDVKKLEMKPKYPHCEEKMVIVTTKSMSRYRGQEHCLHPKLQSTKRFIKWYNAWNEKRRVYEE

SEQ ID NO: 125 - DNA, 300 bp, Mus Musculus
  CDS (1)..(297)
atgaggctcctggcggccgcgctgctcctgctgctcctggcgctgtgcgcctcgcgcgtggacgggtccaagtgtaagtgttcccggaaggggcccaagatccgctacagcgacgtgaagaagctggaaatgaagccaaagtacccacactgcgaggagaagatggttatcgtcaccaccaagagcatgtccaggtaccggggccaggagcactgcctgcaccctaagctgcagagcaccaaacgcttcatcaagtggtacaatgcctggaacgagaagcgcagggtctacgaagaatag

SEQ ID NO: 126 - protein, 99 aa, Mus Musculus; identical to SEQ ID NO: 124

SEQ ID NO: 127 - DNA, 1372 bp, Rattus norvegicus
  CDS (1)..(234)
gggtccaagtgtaagtgttcccggaaggggcccaagatccgctacagcgacgtgaagaagctggaaatgaagccaaagtacccacactgcgaggagaagatggttatcataaccaccaagagcatgtccaggtaccgcggccaggagcactgcctgcatcctaagctgcaaagtaccaagcgcttcatcaaatggtacaacgcctggaacgagaaacgcagggtctacgaagagtagggtggacgatcttggaaagaaaacctccaggccagttgagagacttcagcagaggactttgcagattaaaaataaaagccctttctttctcacaagcataagacaaattatatattgctgtgaagctcttcttaccagggtcagtttttacattttatagctgtgtgcgaaagccttccagatgtgagatccagctctcctgcgtaccagacttcattacaagtggctttttgccgggggttggggggttgggggtgggcccaagcctttcctttttaaaataagggtttttgtatttgtccatatgtcaccacacatctgaactttataagcgcctggaaggagcaatcagtatggttcaggcaattcattgcactgttgctccggtccaggctttcgaagcttcctctcagagagcctggcgcctcggcacagctgccacaggctctcctgggcttatgactggtcaagagtttcggtgtggctccaccatggcccctgttgcagggcaattgggaacaagtccttctgcatctgtgcctagaggaactcaatctacttcccaggatgagcttcatgcccccaccccagccccacccccaccccagctcattcccctatcccaaccaggcaagcgatccttaaaggagctgggtcthtctctcgcaacctmtgagggtttctgaaaggctcactgctttggtagatgatgcttctgaagcatcagaagcccccggcagcgtgagaaaactgtgtggaggaaaaggggaaaattcaggactcaatgcatgacatccagccagagctacacatcctactggcatggggagacccacgtagctctgttcccctcgcccccacagaaagcgcactcccccttcggtgcatatgcaaacagcgaggtcctcttttggagttaggatgaccctgcaccctctcctgtgtacatattgcttcagtacccgcccctgccacacgctgcccctcagtagaggccgcactggacggctgtgaatctgctatgtaagtgctgagattcatgagtgctgcatgcgggtttcatgttctttctaagatgaaaaagaaagtaataaaaatatatttgaakktwmcmaaaaaaaaaaaaaaaaaaaaa

SEQ ID NO: 128 - protein, 78 aa, Rattus norvegicus
GSKCKCSRKGPKIRYSDVKKLEMKPKYPHCEEKMVIITTKSMSRYRGQEHCLHPKLQSTKRFIKWYNAWNEKRRVYEE

SEQ ID NO: 129 - DNA, 237 bp, Rattus norvegicus
  CDS (1)..(234)
gggtccaagtgtaagtgttcccggaaggggcccaagatccgctacagcgacgtgaagaagctggaaatgaagccaaagtacccacactgcgaggagaagatggttatcataaccaccaagagcatgtccaggtaccgcggccaggagcactgcctgcatcctaagctgcaaagtaccaagcgcttcatcaaatggtacaacgcctggaacgagaaacgcagggtctacgaagagtag

SEQ ID NO: 130 - protein, 78 aa, Rattus norvegicus; identical to SEQ ID NO: 128

SEQ ID NO: 131 - DNA, 1458 bp, Unknown
  Macaque
  CDS (3)..(284)
cggccgcgctactcctgctgctgctggcgctgtacaccgcgcgcgtggacgggtccaaatgcaagtgctcccggaagggacccaagattcgctacagcgacgtgaagaagctggaaatgaagccaaagtacccgcactgcgaggagaagatggttatcatcaccaccaagagcgtgtccaggtaccgaggtcaggagcactgcctgcaccccaagctgcagagcaccaaacgcttcatcaagtggtacaacgcctggaacgagaagcgcagggtctacgaagaatagggtgaaaaatctctgatgggaaaactccagaccagttgggagacttgtgcaaaggactttgcagatttaaaaaaaaaaaaaaaaagcctttctttctcccaggcataagacacaagttatatattgttatgaagcactttttaccaacggtcagtttttacattttatagctgcgtgcgaaaggcttccagatgtgagacccatctctcttgtgctccagacttcatcacaggctgctttttatcgaaaaggggaaaactcatgcctttcctttttaagaaatgcttttttgtatttgtccatatgtcactatacatctgagctttataagcgcccgggaggaacaatgagcttggtggacacatttcattgcagtgttactccattcctagcttgggaagcttccgctcagaggtcctggcgcctcggcacagctgccacgggctctcctgggcttatggccggtcacagcctcagtgtgactctgcagtggcccctgtagccgggcaagcaggagcaggtctctctgcatctgttctttgaggaactcaagtttggttgccagaaaaatgtgcttcattcccccctggttaatttttacacaccctaggaaacatttccaagatcctgtgatggcgagacaaatgatccttaaagaagatgtggggtctttcccaacctgagactttctgaaaggttcacaggttcaatatttaatgcttcagaagcatgtgaggttcccaacactgtcagcaaaaaccttaggagaaaacttaaaaatatatgaatacatgcacaatacacagctacagactcacattctgttgacaagggaaaaccttcaaagcatgtttctctccctcaccacaacggaacatgcagtactaaagcaatatatttgtgattccccatgtaattcttcaatgttaaacagtgcagtcctctttcaaaagctaagatgaccatgcgccctttcctctgtacatatacccttaagaacgccccctccacacactgccctccagtatacgccgcattgtactgctgtgttatatgctacgtacatgtcagaaaccattagcattgcatgcaggtttcatattctttctaagatggaaagtaataaaatatatttgaaatgtaaaaaaaaaaaaaaaaaaaaaaaaaaaaa

SEQ ID NO: 132 - protein, 94 aa, Unknown
  Synthetic Construct
AALLLLLLALYTARVDGSKCKCSRKGPKIRYSDVKKLEMKPKYPHCEEKMVIITTKSVSRYRGQEHCLHPKLQSTKRFIKWYNAWNEKRRVYEE

SEQ ID NO: 133 - DNA, 20 bp, Artificial Sequence
  Primer
ccaagcgcttcatcaagtgg

SEQ ID NO: 134 - DNA, 21 bp, Artificial Sequence
  Primer
gcagcctgtgatgaagtctgg

SEQ ID NO: 135 - DNA, 24 bp, Artificial Sequence
  Primer
cagcctattcttcgtagaccctgc

SEQ ID NO: 136 - DNA, 478 bp, Artificial Sequence
  Probe
gtccaagtgtaagtgttcccggaaggggcccaagatccgctacagcgacgtgaagaagctggaaatgaagccaaagtacccacactgcgaggagaagatggttatcgtcaccaccaagagcatgtccaggtaccggggccaggagcactgcctgcaccctaagctgcagagcaccaaacgcttcatcaagtggtacaatgcctggaacgagaagcgcagggtctacgaagaatagggtggacgatcatggaaagaaaaactccaggccagttgagagacttcagcagaggactttgcagattaaaataaaagccctttctttctcacaagcataagacaaattatatattgctatgaagctcttcttaccagggtcagtttttacattttatagctgtgtgtgaaaggcttccagatgtgagatccagctcgcctgcgcaccagacttcattacaagtggctttttgctgggcggttg

SEQ ID NO: 137 - DNA, 2050 bp, Homo Sapiens
  CDS (91)..(1176)
cgaggcggggagccgaggccgccgccagcgcgcagggagccccgagcccgagccccgccgcgaggccgttcgccggctgcccgcagcaccatggatctgcacctcttcgactacgccgagccaggcaacttctccgacataagctggccgtgcaacagcagcgactgcatcgtcgtggacaccgtgctgtgccccaacatgcccaacaaaagcgtgctgctgtacacgctgtccttcatttacatcttcatcttcgtgatcggcatgatcgccaactccgtggtggtctgggtgaacatccaggccaagaccaccggctacgacactcactgctacatcctcaacctggccatcgccgacctgtgggtggtcgtcaccatccccgtctgggtggtcagcctcgtgcagcataaccagtggcccatgggggagctcacgtgcaagatcacgcacctcatcttctccatcaacctgttcggcagcatcttcttcctcacgtgcatgagcgtggaccgctacctctccatcacctacttcgccagcacgtcgagccgcaggaagaaggtggttcgccgcgccgtctgtgtcctggtgtggctgctggccttctgcgtgtccctgcccgacacctactacctgaagaccgtcacgtcggcgtccaacaacgagacctactgccgctccttctaccccgagcacagcgtcaaggagtggctcatcagcatggagctggtctcggtggtcctgggcttcgccatccccttctgcgtcatcgccgtcttctactgcctgctggcccgcgccatctccgcgtccagcgaccaggagaagcagagcagccgaaagatcatcttctcctacgtggtggtcttcctcgtgtgctggctcccctaccacgtggtggtgctcctggacatcttctccatccttcactacatccccttcacctgccagctggagaacttcctcttcacggctctgcacgtcacgcagtgcctgtctctggtgcactgctgcgtcaaccccgtgctctatagcttcatcaaccgtaactacagatacgagctgatgaaggccttcatctttaagtactcggccaagacgggtctcaccaagctcatcgatgcctccagggtgtcggagacggagtactccgccttggagcaaaacgccaagtgacaggccccgcggggcctcggggacaagcgtgcgcgcttcctacacggcgctgggttgcatcgtctccaagagttcaagcaaggcgccttggggcttgaggcctgagtcgcgtgaagtggggaagcaggtgccaccgtgggcccttctcctctttgtccggctgccggggtggctgtcacggggccgtcgtgcctgcaggcgtgggccgtgctgcgtgaccctactacttactcgtccaagccggttgccggcgggctcgcctgcacttctgtaaaataggactttctgtgttccctggaggttttacttggtgacttgtatttaagttttaagactttattttctcattatcggcgtaccttataaatgtacttgaaagtttaaatatattttataaaaatcgtatgggcgctgtcacatacgatacatatacatacgctgacatatattcagagcgttgtagttttaactagtttgatttcagttttgactaaggatgacattaattgttagctgttttgaaattttatatatatatataaatataaatataaatatataaatatataaatatatgccggtctgggctgaaatgttttatttacgatagttttatatctgtgtggtgctttgctacctgcatgggatatgggacaagaaggacgctgtaaagcagtttgtgatattaattgtatcgtaaagttacattaaaaatgcgaaacgaagcggaacctctccaggctgcagcgccgcgcacaaagttttgaacagtcttatttcggagagttctctcaatttgtaagttatttttctttttttttttttttaataaagatttgtttttcctaaaaaaggcaaaaaaaaaaaaaaa

SEQ ID NO: 138 - protein, 362 aa, Homo Sapiens
MDLHLFDYAEPGNFSDISWPCNSSDCIVVDTVLCPNMPNKSVLLYTLSFIYIFIFVIGMIANSVVVWVNIQAKTTGYDTHCYILNLAIADLWVVVTIPVWVVSLVQHNQWPMGELTCKITHLIFSINLFGSIFFLTCMSVDRYLSITYFASTSSRRKKVVRRAVCVLVWLLAFCVSLPDTYYLKTVTSASNNETYCRSFYPEHSVKEWLISMELVSVVLGFAIPFCVIAVFYCLLARAISASSDQEKQSSRKIIFSYVVVFLVCWLPYHVVVLLDIFSILHYIPFTCQLENFLFTALHVTQCLSLVHCCVNPVLYSFINRNYRYELMKAFIFKYSAKTGLTKLIDASRVSETEYSALEQNAK

SEQ ID NO: 139 - DNA, 1860 bp, Mus Musculus
  CDS (89)..(1174)
cactgaaggagcctgcagcgctcaccgtcaggaaggcaaaccacagcccaggaagccctgaggtcacttggtcgctctcctcaagaccatggatgtgcacttgtttgactatgcagagcctggcaactactctgacatcaactggccatgtaacagcagcgactgcattgtggtggacactgtgcagtgtcccaccatgcctaacaagaacgtgcttctgtataccctctccttcatctacattttcatcttcgtgatcggcatgattgccaactctgtggtggtctgggtgaatatccaggctaagaccacaggctacgacacgcactgctacatcttgaacctggccattgcagacctgtgggtcgtcatcaccacccccgtctgggtggtcagtctcgtgcagcataaccagtggcccatgggggagctcacatgcaagatcacacacctcattttctccatcaacctctttgggagcatcttcttcctcgcctgcatgagcgtggaccgctatctctccatcacctacttcaccggcacctccagctataagaagaagatggtacgccgtgttgtatgcatcttggtgtggctgctggccttctttgtgtccctgcctgatacctactacctgaaggcggtcacatctgcttccaacaatgagacctactgcaggtccttctaccccgagcacagcatcaaggagtggctgatcggcatggagctggtctctgtcatcttgggctttgctgtccccttcactatcattgcgatcttctacttcctgctcgctagagccatgtcagcatcaggcgaccaggagaagcacagtagccggaagatcatcttctcctacgtggtggtcttcctggtatgttggctgccgtaccattttgtggttctgctggacatcttctccatcttacactacatcccgtttacctgtcagctggagaatgtgctctttacagcgttgcatgtcacccagtgcctgtccttggtgcactgctgtgtcaaccccgtgctctatagcttcatcaaccgcaactacaggtacgagctgatgaaggccttcatcttcaagtactcggccaaaacaggtctcaccaagctcattgatgcctccagagtgtcagagacagagtactctgccctggaacagaacaccaagtgatccatcattctgcagaggtcggggggacacgtgcatgttgcaaatggggcggctgggtcctgtggtttcttcaagaaagcaatgtagctttgggtctggttgcttgagtggtatgaagaggagaaagcatgtgaccatgcttcctgtctctcattctccagccaagatggctgccgcctggatgcccatcctgacagctggcagctggcagcaggcagggctgtgctgtgctgtgctgtgctgcgctgtgctgtgctgtgcagccagagctgcgtatcaaagccagcaccaggacaggctcttatggacatgtgtacagtagaatcttctgtgtttcttcaagtttttacttggtgactttttgtatttaagttttaagactttattttctcactatggatgtaccttataaatgtatttgaaagctaaatatattttaaatattgtatgggaggtgtaaggctgttgtattcagaccatgtaggcctcagattagctggacttgagttttgactaaggatgacattaattgttagctgatttgaaattatatatataaatataaaaatatatataaatttatgccagtctcggctgaaaggttttatttacaatagttttatatctgtgcaatgtttaatgctggcacagcatatgaaacaacaactgcccagcaatgcagt

SEQ ID NO: 140 - protein, 362 aa, Mus Musculus
MDVHLFDYAEPGNYSDINWPCNSSDCIVVDTVQCPTMPNKNVLLYTLSFIYIFIFVIGMIANSVVVWVNIQAKTTGYDTHCYILNLAIADLWVVITTPVWVVSLVQHNQWPMGELTCKITHLIFSINLFGSIFFLACMSVDRYLSITYFTGTSSYKKKMVRRVVCILVWLLAFFVSLPDTYYLKAVTSASNNETYCRSFYPEHSIKEWLIGMELVSVILGFAVPFTIIAIFYFLLARAMSASGDQEKHSSRKIIFSYVVVFLVCWLPYHFVVLLDIFSILHYIPFTCQLENVLFTALHVTQCLSLVHCCVNPVLYSFINRNYRYELMKAFIFKYSAKTGLTKLIDASRVSETEYSALEQNTK

SEQ ID NO: 141 - DNA, 1895 bp, Canis familiaris
  CDS (1)..(1086)
  misc_feature (1)..(1895): n = A,T,C or G
atggatctgcacctcttcgactacncngagccaggnaacttctcggacatcagctggccatgcaacagcagcgactgcatcgtggtggacacggtgatgtgtcccaacatgcccaacaaaagcgtcctgctctacacgctctccttcatttacattttcatcttcgtcatcggcatgattgccaactccgtggtggtctgggtgaatatccaggccaagaccacaggctatgacacgcactgctacatcttgaacctggccattgccgacctgtgggttgtcctcaccatcccagtctgggtggtcagtctcgtgcagcacaaccagtggcccatgggcgagctcacgtgcaaagtcacacacctcatcttctccatcaacctcttcagcngcattttcttcctcacgtgcatgagcgtggaccgctacctctccatcacctacttcaccaacacccccagcagcaggaagaagatggtacgccgtgtcgtctgcatcctggtgtggctgctggccttctgcgtgtctctgcctgacacctactacctgaagaccgtcacgtctgcgtccaacaatgagacctactgccggtccttctaccccgagcacagcatcaaggagtggctgatcggcatggagctggtctccgttgtcttgggctttgccgttcccttctccattatcgctgtcttctacttcctgctggccagagccatctcggcgtccagtgaccaggagaagcacagcagccggaagatcatcttctcctacgtggtggtcttccttgtctgctggntgccctaccacgtggcggtgctgctggacatcttctccatcctgcactacatccctttcacctgccggctggagcacgccctcttcacggccctgcatgtcacacagtgcctgtcgctggtgcactgctgcgtcaaccctgtcctctacagcttcatcaatcgcaactacaggtacgagctgatgaaggccttcatcttcaagtactcggccaaaacagggctcaccaagctcatcgatgcctccagagtntcngagacggagtactcngccttggagcanancnccaaatgatctgccctggagaggctctgggacgggtttacttgtttttgaacagggtgatgggccctatggttttctagagcaaagcaaagtagcttcgggtcttgatgcttgagtagagtgaagaggggagcacgtgccccctgcatccattntctctttctcttgatgacgcagctgtcatttggctgtgcgtgctgacagttttgcaacaggcagagctgtgtcgcacagcagtgctgtgcgtcagagccagctgaggacaggcttgcctggacttctgtaagataggattttctgtgtttcctgaattttttatatggtgatttgtatttaaattttaagactttattttctcactattggtgtaccttataaatgtatttgaaagttaaatatattttaaatattgtttgggaggcatagtgctgacatatattcagagtgttgtagttttaaggttagcgtgactttcagttttgactaaggatgacactaattgttagctgttttgaaattatatatatataaatatataaatatatgccagtcttggctgaaatgttttatttaccatagttttatatctgtgtggtgttttgtaccggcacgggatatggaacgaaaactgctttgtaatgcagtttgtgacattaatagtattgtaaagttacattttaaaataaacaaaaaactgttctggactgcaaatctgcacacacaacgaacagttgcatttcagagagttctctcaatttgtaagttatttttttttaataaagatttttgtttcctaaaaaaaaaaaaaaaaaaaa

SEQ ID NO: 142 - protein, 362 aa, Canis familiaris
  misc_feature (9)..(9): The 'Xaa' at location 9 stands for Thr, Ala, Pro, or Ser.
  misc_feature (131)..(131): The 'Xaa' at location 131 stands for Ser, Gly, Arg, or Cys.
  misc_feature (266)..(266): The 'Xaa' at location 266 stands for Met, Val, or Leu.
  misc_feature (350)..(350): The 'Xaa' at location 350 stands for Ser.
  misc_feature (355)..(355): The 'Xaa' at location 355 stands for Ser.
  misc_feature (359)..(359): The 'Xaa' at location 359 stands for Gln, or His.
  misc_feature (360)..(360): The 'Xaa' at location 360 stands for Asn, Ser, Thr, or Ile.
  misc_feature (361)..(361): The 'Xaa' at location 361 stands for Thr, Ala, Pro, or Ser.
MDLHLFDYXEPGNFSDISWPCNSSDCIVVDTVMCPNMPNKSVLLYTLSFIYIFIFVIGMIANSVVVWVNIQAKTTGYDTHCYILNLAIADLWVVLTIPVWVVSLVQHNQWPMGELTCKVTHLIFSINLFSXIFFLTCMSVDRYLSITYFTNTPSSRKKMVRRVVCILVWLLAFCVSLPDTYYLKTVTSASNNETYCRSFYPEHSIKEWLIGMELVSVVLGFAVPFSIIAVFYFLLARAISASSDQEKHSSRKIIFSYVVVFLVCWXPYHVAVLLDIFSILHYIPFTCRLEHALFTALHVTQCLSLVHCCVNPVLYSFINRNYRYELMKAFIFKYSAKTGLTKLIDASRVXETEYXALEXXXK

SEQ ID NO: 143 - protein, 94 aa, Unknown; identical to SEQ ID NO: 132
  Macaque

SEQ ID NO: 144 - DNA, 285 bp, Unknown
  Macaque
  CDS (1)..(282)
gccgcgctactcctgctgctgctggcgctgtacaccgcgcgcgtggacgggtccaaatgcaagtgctcccggaagggacccaagattcgctacagcgacgtgaagaagctggaaatgaagccaaagtacccgcactgcgaggagaagatggttatcatcaccaccaagagcgtgtccaggtaccgaggtcaggagcactgcctgcaccccaagctgcagagcaccaaacgcttcatcaagtggtacaacgcctggaacgagaagcgcagggtctacgaagaatag

SEQ ID NO: 145 - protein, 94 aa, Unknown; identical to SEQ ID NO: 132
  Synthetic Construct

SEQ ID NO: 146 - DNA, 2570 bp, Homo Sapiens
  CDS (99)..(1388)
gtcgacccacgcgtccgggccgcggcgccgagtcgaacggggagccgagctggagctaccgcggcgcagccaggccggcgaccaccaggggcctgaggatgaagccaagtctgctgtgccggcccctgtcctgcttccttatgctgctgccctggcctctcgccaccctgacatcaacaaccctttggcagtgcccacctggggaggagcccgacctggacccagggcagggcacattatgcaggccctgccccccaggcaccttctcagctgcatggggctccagcccatgccagccccatgcccgttgcagcctttggaggaggctggaggcccaggtgggcatggcaactcgagatacactctgtggagactgctggcctgggtggtttgggccttggggggttccccgcgttccatgtcaaccatgttcctgggcacctctgggtactcatggctgtgatgagtgggggcggcgggcccgacgtggcgtggaggtggcagcaggggccagcagcggtggtgagacacggcagcctgggaacggcacccgggcaggtggcccagaggagacagccgcccagtacgcggtcatcgccatcgtccctgtcttctgcctcatggggctgttgggcatcctggtgtgcaacctcctcaagcggaagggctaccactgcacggcgcacaaggaggtcgggcccggccctggaggtggaggcagtggaatcaaccctgcctaccggactgaggatgccaatgaggacaccattggggtcctggtgcgcttgatcacagagaagaaagagaatgctgcggccctggaggagctgctgaaagagtaccacagcaaacagctggtgcagacgagccacaggcctgtgtccaagctgccgccagcgcccccgaacgtgccacacatctgcccgcaccgccaccatctccacaccgtgcagggcctggcctcgctctctggcccctgctgctcccgctgtagccagaagaagtggcccgaggtgctgctgtcccctgaggctgtagccgccactactcctgttcccagccttctgcctaacccgaccagggttcccaaggccggggccaaggcagggcgtcagggcgagatcaccatcttgtctgtgggcaggttccgcgtggctcgaattcctgagcagcggacaagttcaatggtgtctgaggtgaagaccatcacggaggctgggccctcgtggggtgatctccctgactccccacagcctggcctcccccctgagcagcaggccctgctaggaagtggcggaagccgtacaaagtggctgaagcccccagcagagaacaaggccgaggagaaccgctatgtggtccggctaagtgagagcaacctggtcatctgaggggcggtctagtctaaggacactgcggccctgccctgggaggttccgaaggcttcctggaggaggtggagctgcagctgggactgtgaggaccgagaagcaatggcccagcagacgagacagcaaagaccaaggcctggaggtgggagcgtctgccccagtgaggaggcaggtggccggcgggcactgtgtacaggagcaggctgagccccgcccctggccctgctgccatgttgctcccctgaaggatgccccgacccccgtgcctgccctggctggatcctaggagcccacgggattctctgtatcatcagaggctgggcttggcagaggggaggggcctgtgcccgtcacccctggccccattccttggtaattagccacacccttgcctctgtacagggccctagagcagatgtgcgtccccctcctcttccagcaggtctataaagggaaggggtagcagaaagtcctgggctaggagagtgagtccctgggttctaatcttgggcacatctgtggccatcgctgggtccatttttctgactgtgaagtaaggagagacgtctcagtacccagggcctcttcagctctttgtaggttctgggctgggttgtgggggactggggagctgggctctaccatccctcccattagtagctttatccagccccgtttttgctgcttccagggcctctgccttcaaggcccccatggggctgtccatccatggctctgcctacggaaggggcttaatgcatgtgcctgcccctcccccagctgtttttaatgaaactgaaaaaatagacttgatcccggcaggactgtgatacagagccctagcctgcccagccagccccaagatctcaggagctttagggagaagacttggtggggctggagcacaccttgggcctcagtggtttctgtgtccctgtggtgccagtgcttctgggcagtgcaggcggctgccaggcccagccctgacttccactctggctcagcaacctggttatttatgtggggccgtgcaggcatgggcccactgcctgtccatcctgtttctcttatttattgaaactcaccattgccctatccttgtgtctccacccccttccatgtgttgaataataaaaggtgggaaagtgaaaaaaaaaaaaaaaaaaaaagggcggccgc

SEQ ID NO: 147 - protein, 430 aa, Homo Sapiens
MKPSLLCRPLSCFLMLLPWPLATLTSTTLWQCPPGEEPDLDPGQGTLCRPCPPGTFSAAWGSSPCQPHARCSLWRRLEAQVGMATRDTLCGDCWPGWFGPWGVPRVPCQPCSWAPLGTHGCDEWGRRARRGVEVAAGASSGGETRQPGNGTRAGGPEETAAQYAVIAIVPVFCLMGLLGILVCNLLKRKGYHCTAHKEVGPGPGGGGSGINPAYRTEDANEDTIGVLVRLITEKKENAAALEELLKEYHSKQLVQTSHRPVSKLPPAPPNVPHICPHRHHLHTVQGLASLSGPCCSRCSQKKWPEVLLSPEAVAATTPVPSLLPNPTRVPKAGAKAGRQGEITILSVGRFRVARIPEQRTSSMVSEVKTITEAGPSWGDLPDSPQPGLPPEQQALLGSGGSRTKWLKPPAENKAEENRYVVRLSESNLVI

SEQ ID NO: 148 - DNA, 1290 bp, Homo Sapiens
atgaagccaagtctgctgtgccggcccctgtcctgcttccttatgctgctgccctggcctctcgccaccctgacatcaacaaccctttggcagtgcccacctggggaggagcccgacctggacccagggcagggcacattatgcaggccctgccccccaggcaccttctcagctgcatggggctccagcccatgccagccccatgcccgttgcagcctttggaggaggctggaggcccaggtgggcatggcaactcgagatacactctgtggagactgctggcctgggtggtttgggccttggggggttccccgcgttccatgtcaaccatgttcctgggcacctctgggtactcatggctgtgatgagtgggggcggcgggcccgacgtggcgtggaggtggcagcaggggccagcagcggtggtgagacacggcagcctgggaacggcacccgggcaggtggcccagaggagacagccgcccagtacgcggtcatcgccatcgtccctgtcttctgcctcatggggctgttgggcatcctggtgtgcaacctcctcaagcggaagggctaccactgcacggcgcacaaggaggtcgggcccggccctggaggtggaggcagtggaatcaaccctgcctaccggactgaggatgccaatgaggacaccattggggtcctggtgcgcttgatcacagagaagaaagagaatgctgcggccctggaggagctgctgaaagagtaccacagcaaacagctggtgcagacgagccacaggcctgtgtccaagctgccgccagcgcccccgaacgtgccacacatctgcccgcaccgccaccatctccacaccgtgcagggcctggcctcgctctctggcccctgctgctcccgctgtagccagaagaagtggcccgaggtgctgctgtcccctgaggctgtagccgccactactcctgttcccagccttctgcctaacccgaccagggttcccaaggccggggccaaggcagggcgtcagggcgagatcaccatcttgtctgtgggcaggttccgcgtggctcgaattcctgagcagcggacaagttcaatggtgtctgaggtgaagaccatcacggaggctgggccctcgtggggtgatctccctgactccccacagcctggcctcccccctgagcagcaggccctgctaggaagtggcggaagccgtacaaagtggctgaagcccccagcagagaacaaggccgaggagaaccgctatgtggtccggctaagtgagagcaacctggtcatc

SEQ ID NO: 149 - protein, 408 aa, Homo Sapiens
TLTSTTLWQCPPGEEPDLDPGQGTLCRPCPPGTFSAAWGSSPCQPHARCSLWRRLEAQVGMATRDTLCGDCWPGWFGPWGVPRVPCQPCSWAPLGTHGCDEWGRRARRGVEVAAGASSGGETRQPGNGTRAGGPEETAAQYAVIAIVPVFCLMGLLGILVCNLLKRKGYHCTAHKEVGPGPGGGGSGINPAYRTEDANEDTIGVLVRLITEKKENAAALEELLKEYHSKQLVQTSHRPVSKLPPAPPNVPHICPHRHHLHTVQGLASLSGPCCSRCSQKKWPEVLLSPEAVAATTPVPSLLPNPTRVPKAGAKAGRQGEITILSVGRFRVARIPEQRTSSMVSEVKTITEAGPSWGDLPDSPQPGLPPEQQALLGSGGSRTKWLKPPAENKAEENRYVVRLSESNLVI

SEQ ID NO: 150 - protein, 40 aa, Homo Sapiens
CPDGTYTDSWNHEQCLPCTRCEPMGQYMVQPCTWTQNTVC

SEQ ID NO: 151 - protein, 40 aa, Homo Sapiens
CPPGTFSAAWGSSPCQPHARCSLWRRLEAQVGMATRDTLC

SEQ ID NO: 152 - DNA, 29 bp, Artificial Sequence
  Oligonucleotide
ctggtggtccccggactcctacttcggtt

SEQ ID NO: 153 - DNA, 20 bp, Artificial Sequence
  Oligonucleotide
gactcctacttcggttcaga

SEQ ID NO: 154 - DNA, 5042 bp, Homo Sapiens
  CDS (127)..(3690)
gtcgacccacgcgtccgggcgccccgcgcagtgcaggctgcaggcgccgcgccgaggaggctgccgctctggcttgccgccccccgccgccgctgcacaccggacccagccgccgtgccgcgggccatggacctgcccaggggcctggtggtggcctgggcgctcagcctgtggccagggttcacggacaccttcaacatggacaccaggaagccccgggtcatccctggctccaggaccgccttctttggctacacagtgcagcagcacgacatcagtggcaataagtggctggtcgtgggcgccccactggaaaccaatggctaccagaagacgggagacgtgtacaagtgtccagtgatccacgggaactgcaccaaactcaacctgggaagggtcaccctgtccaacgtgtccgagcggaaagacaacatgcgcctcggccttagtctcgccaccaaccccaaggacaacagcttcctggcctgcagccccctctggtctcatgagtgtgggagctcctactacaccacagggatgtgttcaagagtcaactccaacttcaggttctccaagaccgtggccccagctctccaaaggtgccagacctacatggacatcgtcattgtcctggatggctccaacagcatctacccctgggtggaggttcagcacttcctcatcaacatcctgaaaaagttttacattggcccagggcagatccaggttggagttgtgcagtatggcgaagatgtggtgcatgagtttcacctcaacgactacaggtctgtaaaagatgtggtggaagctgccagccacattgagcagagaggaggaacagagacccggacggcatttggcattgaatttgcacgctcagaggctttccagaagggtggaaggaaaggagccaagaaggtgatgattgtcatcacagatggggagtcccacgacagcccagacctggagaaggtgatccagcaaagcgaaagagacaacgtaacaagatatgcggtggccgtcctgggctactacaaccgcagggggatcaatccagaaacttttctaaatgaaatcaaatacatcgccagtgaccctgatgacaagcacttcttcaatgtcactgatgaggctgccttgaaggacattgtcgatgccctgggggacagaatcttcagcctggaaggcaccaacaagaacgagacctcctttgggctggagatgtcacagacgggcttttcctcgcacgtggtggaggatggggttctgctgggagccgtcggtgcctatgactggaatggagctgtgctaaaggagacgagtgccgggaaggtcattcctctccgcgagtcctacctgaaagagttccccgaggagctcaagaaccatggtgcatacctggggtacacagtcacatcggtcgtgtcctccaggcaggggcgagtgtacgtggccggagccccccggttcaaccacacgggcaaggtcatcctgttcaccatgcacaacaaccggagcctcaccatccaccaggctatgcggggccagcagataggctcttactttgggagtgaaatcacctcggtggacatcgacggcgacggcgtgactgatgtcctgctggtgggcgcacccatgtacttcaacgagggccgtgagcgaggcaaggtgtacgtctatgagctgagacagaaccggtttgtttataacggaacgctaaaggattcacacagttaccagaatgcccgatttgggtcctccattgcctcagttcgagacctcaaccaggattcctacaatgacgtggtggtgggagcccccctggaggacaaccacgcaggagccatctacatcttccacggcttccgaggcagcatcctgaagacacctaagcagagaatcacagcctcagagctggctaccggcctccagtattttggctgcagcatccacgggcaattggacctcaatgaggatgggctcatcgacctggcagtgggagcccttggcaacgctgtgattctgtggtcccgcccagtggttcagatcaatgccagcctccactttgagccatccaagatcaacatcttccacagagactgcaagcgcagtggcagggatgccacctgcctggccgccttcctctgcttcacgcccatcttcctggcaccccatttccaaacaacaactgttggcatcagatacaacgccaccatggatgagaggcggtatacaccgagggcccacctggacgagggcggggaccgattcaccaacagagccgtactgctctcctccggccaggagctctgtgagcggatcaacttccatgtcctggacactgctgactacgtgaagccagtgaccttctcagtcgagtattccctggaggaccctgaccatggccccatgctggacgacggctggcccaccactctcagagtctcggtgcccttctggaacggctgcaatgaggatgagcactgtgtccctgaccttgtgttggatgcccggagtgacctgcccacggccatggagtactgccagagggtgctgaggaagcctgcgcaggactgctccgcatacacgctgtccttcgacaccacagtcttcatcatagagagcacacgccagcgagtggcggtggaggccacactggagaacaggggcgagaacgcctacagcacggtcctaaatatctcgcagtcagcaaacctgcagtttgccagcttgatccagaaggaggactcagacggtagcattgagtgtgtgaacgaggagaggaggctccagaagcaagtctgcaacgtcagctatcccttcttccgggccaaggccaaggtggctttccgtcttgattttgagttcagcaaatccatcttcctacaccacctggagatcgagctcgctgcaggcagtgacagtaatgagcgggacagcaccaaggaagacaacgtggcccccttacgcttccacctcaaatacgaggctgacgtcctcttcaccaggagcagcagcctgagccactacgaggtcaagcccaacagctcgctggagagatacgatggtatcgggcctcccttcagctgcatcttcaggatccagaacttgggcttgttccccatccacgggatgatgatgaagatcaccattcccatcgccaccaggagcggcaaccgcctactgaagctgagggacttcctcacggacgaggcgaacacgtcctgtaacatctggggcaatagcactgagtaccggcccaccccagtggaggaagacttgcgtcgtgctccacagctgaatcacagcaactctgatgtcgtctccatcaactgcaatatacggctggtccccaaccaggaaatcaatttccatctactggggaacctgtggttgaggtccctaaaagcactcaagtacaaatccatgaaaatcatggtcaacgcagccttgcagaggcagttccacagccccttcatcttccgtgaggaggatcccagccgccagatcgtgtttgagatctccaagcaagaggactggcaggtccccatctggatcattgtaggcagcaccctggggggcctcctactgctggccctgctggtcctggcactgtggaagctcggcttctttagaagtgccaggcgcaggagggagcctggtctggaccccacccccaaagtgctggagtgaggctccagaggagactttgagttgatgggggccaggacaccagtccaggtagtgttgagacccaggcctgtggccccaccgagctggagcggagaggaagccagctggctttgcacttgacctcatctcccgagcaatggcgcctgctccctccagaatggaactcaagctggttttaagtggaactgccctactgggagactgggacacctttaacacagacccctagggatttaaagggacacccctacacacacccaggcccacgccaaggcctccctcaggctctgtggagggcatttgctgccccagctactaaggtgctaggaattcgtaatcatccccatcctccagagaaacccagggaggaagactgtaaatacgaacccaatctgcacactccaggcctctagttccagaaggatccaagacaaaacagatctgaattctgcccttttctctcacccatcccacccctccattggctcccaagtcacacccactcccttccccatagataggcccctggggctcctgaagaatgaacccaagagcaagggcttgatggtgacagctgcaagccagggatgaagaaagactctgagatgtggagactgatggccaggcaagtgggaccaggatactggacgctgtcctgagatgagaggtagccgggctctgcacccacgtgcattcacattgaccgcaactcacacattcccccaccagctgcagccccttgctctcagctgccaaccctcccgggtcacttttgttcccaggtacctcatgggaagcatgtggatgacacaatccctggggctgtgcattcccacgtcttcttgctgcagcctgcccctagacatggacgcactggcctggctgcagctgggcagcaggggtaggggtagggagcctcccctccctgtatcaccccctccctacacacacacacacacacacacacacacactgcctcccatccttccctcatgcccgccagtgcacagggaagggcttggccagcgctgttgaggggtcccctctggaatgcactgaataaagcacgtgcaaggactcccggagcctgtgcagccttggtggcaaatatctcatctgccggcccccaggacaagtggtatgaccagtgataatgccccaaggacaaggggcgtgcctggcgcccagtggagtaatttatgccttagtcttgttttgaggtagaaatgcaagggggacacatgaaaggcatcagtccccctgtgcatagtacgacctttactgtcgtatttttgaaaaattaaaaatacagtgtttaaaaacaaaaaaaaaaaaaaaagggcggccgc

SEQ ID NO: 155 - protein, 1188 aa, Homo Sapiens [sequence omitted]

SEQ ID NO: 156 - DNA, 3564 bp, Homo Sapiens
  CDS (1)..(3564)
atggacctgcccaggggcctggtggtggcctgggcgctcagcctgtggccagggttcacggacaccttcaacatggacaccaggaagccccgggtcatccctggctccaggaccgccttctttggctacacagtgcagcagcacgacatcagtggcaataagtggctggtcgtgggcgccccactggaaaccaatggctaccagaagacgggagacgtgtacaagtgtccagtgatccacgggaactgcaccaaactcaacctgggaagggtcaccctgtccaacgtgtccgagcggaaagacaacatgcgcctcggccttagtctcgccaccaaccccaaggacaacagcttcctggcctgcagccccctctggtctcatgagtgtgggagctcctactacaccacagggatgtgttcaagagtcaactccaacttcaggttctccaagaccgtggccccagctctccaaaggtgccagacctacatggacatcgtcattgtcctggatggctccaacagcatctacccctgggtggaggttcagcacttcctcatcaacatcctgaaaaagttttacattggcccagggcagatccaggttggagttgtgcagtatggcgaagatgtggtgcatgagtttcacctcaacgactacaggtctgtaaaagatgtggtggaagctgccagccacattgagcagagaggaggaacagagacccggacggcatttggcattgaatttgcacgctcagaggctttccagaagggtggaaggaaaggagccaagaaggtgatgattgtcatcacagatggggagtcccacgacagcccagacctggagaaggtgatccagcaaagcgaaagagacaacgtaacaagatatgcggtggccgtcctgggctactacaaccgcagggggatcaatccagaaacttttctaaatgaaatcaaatacatcgccagtgaccctgatgacaagcacttcttcaatgtcactgatgaggctgccttgaaggacattgtcgatgccctgggggacagaatcttcagcctggaaggcaccaacaagaacgagacctcctttgggctggagatgtcacagacgggcttttcctcgcacgtggtggaggatggggttctgctgggagccgtcggtgcctatgactggaatggagctgtgctaaaggagacgagtgccgggaaggtcattcctctccgcgagtcctacctgaaagagttccccgaggagctcaagaaccatggtgcatacctggggtacacagtcacatcggtcgtgtcctccaggcaggggcgagtgtacgtggccggagccccccggttcaaccacacgggcaaggtcatcctgttcaccatgcacaacaaccggagcctcaccatccaccaggctatgcggggccagcagataggctcttactttgggagtgaaatcacctcggtggacatcgacggcgacggcgtgactgatgtcctgctggtgggcgcacccatgtacttcaacgagggccgtgagcgaggcaaggtgtacgtctatgagctgagacagaaccggtttgtttataacggaacgctaaaggattcacacagttaccagaatgcccgatttgggtcctccattgcctcagttcgagacctcaaccaggattcctacaatgacgtggtggtgggagcccccctggaggacaaccacgcaggagccatctacatcttccacggcttccgaggcagcatcctgaagacacctaagcagagaatcacagcctcagagctggctaccggcctccagtattttggctgcagcatccacgggcaattggacctcaatgaggatgggctcatcgacctggcagtgggagcccttggcaacgctgtgattctgtggtcccgcccagtggttcagatcaatgccagcctccactttgagccatccaagatcaacatcttccacagagactgcaagcgcagtggcagggatgccacctgcctggccgccttcctctgcttcacgcccatcttcctggcaccccatttccaaacaacaactgttggcatcagatacaacgccaccatggatgagaggcggtatacaccgagggcccacctggacgagggcggggaccgattcaccaacagagccgtactgctctcctccggccaggagctctgtgagcggatcaacttccatgtcctggacactgctgactacgtgaagccagtgaccttctcagtcgagtattccctggaggaccctgaccatggccccatgctggacgacggctggcccaccactctcagagtctcggtgcccttctggaacggctgcaatgaggatgagcactgtgtccctgaccttgtgttggatgcccggagtgacctgcccacggccatggagtactgccagagggtgctgaggaagcctgcgcaggactgctccgcatacacgctgtccttcgacaccacagtcttcatcatagagagcacacgccagcgagtggcggtggaggccacactggagaacaggggcgagaacgcctacagcacggtcctaaatatctcgcagtcagcaaacctgcagtttgccagcttgatccagaaggaggactcagacggtagcattgagtgtgtgaacgaggagaggaggctccagaagcaagtctgcaacgtcagctatcccttcttccgggccaaggccaaggtggctttccgtcttgattttgagttcagcaaatccatcttcctacaccacctggagatcgagctcgctgcaggcagtgacagtaatgagcgggacagcaccaaggaagacaacgtggcccccttacgcttccacctcaaatacgaggctgacgtcctcttcaccaggagcagcagcctgagccactacgaggtcaagcccaacagctcgctggagagatacgatggtatcgggcctcccttcagctgcatcttcaggatccagaacttgggcttgttccccatccacgggatgatgatgaagatcaccattcccatcgccaccaggagcggcaaccgcctactgaagctgagggacttcctcacggacgaggcgaacacgtcctgtaacatctggggcaatagcactgagtaccggcccaccccagtggaggaagacttgcgtcgtgctccacagctgaatcacagcaactctgatgtcgtctccatcaactgcaatatacggctggtccccaaccaggaaatcaatttccatctactggggaacctgtggttgaggtccctaaaagcactcaagtacaaatccatgaaaatcatggtcaacgcagccttgcagaggcagttccacagccccttcatcttccgtgaggaggatcccagccgccagatcgtgtttgagatctccaagcaagaggactggcaggtccccatctggatcattgtaggcagcaccctggggggcctcctactgctggccctgctggtcctggcactgtggaagctcggcttctttagaagtgccaggcgcaggagggagcctggtctggaccccacccccaaagtgctggag

SEQ ID NO: 157 - protein, 1188 aa, Homo Sapiens [sequence omitted]

SEQ ID NO: 158 - protein, 1166 aa, Homo Sapiens
FNMDTRKPRVIPGSRTAFFGYTVQQHDISGNKWLVVGAPLETNGYQKTGDVYKCPVIHGNCTKLNLGRVTLSNVSERKDNMRLGLSLATNPKDNSFLACSPLWSHECGSSYYTTGMCSRVNSNFRFSKTVAPALQRCQTYMDIVIVLDGSNSIYPWVEVQHFLINILKKFYIGPGQIQVGVVQYGEDVVHEFHLNDYRSVKDVVEAASHIEQRGGTETRTAFGIEFARSEAFQKGGRKGAKKVMIVITDGESHDSPDLEKVIQQSERDNVTRYAVAVLGYYNRRGINPETFLNEIKYIASDPDDKHFFNVTDEAALKDIVDALGDRIFSLEGTNKNETSFGLEMSQTGFSSHVVEDGVLLGAVGAYDWNGAVLKETSAGKVIPLRESYLKEFPEELKNHGAYLGYTVTSVVSSRQGRVYVAGAPRFNHTGKVILFTMHNNRSLTIHQAMRGQQIGSYFGSEITSVDIDGDGVTDVLLVGAPMYFNEGRERGKVYVYELRQNRFVYNGTLKDSHSYQNARFGSSIASVRDLNQDSYNDVVVGAPLEDNHAGAIYIFHGFRGSILKTPKQRITASELATGLQYFGCSIHGQLDLNEDGLIDLAVGALGNAVILWSRPVVQINASLHFEPSKINIFHRDCKRSGRDATCLAAFLCFTPIFLAPHFQTTTVGIRYNATMDERRYTPRAHLDEGGDRFTNRAVLLSSGQELCERINFHVLDTADYVKPVTFSVEYSLEDPDHGPMLDDGWPTTLRVSVPFWNGCNEDEHCVPDLVLDARSDLPTAMEYCQRVLRKPAQDCSAYTLSFDTTVFIIESTRQRVAVEATLENRGENAYSTVLNISQSANLQFASLIQKEDSDGSIECVNEERRLQKQVCNVSYPFFRAKAKVAFRLDFEFSKSIFLHHLEIELAAGSDSNERDSTKEDNVAPLRFHLKYEADVLFTRSSSLSHYEVKPNSSLERYDGIGPPFSCIFRIQNLGLFPIHGMMMKITIPIATRSGNRLLKLRDFLTDEANTSCNIWGNSTEYRPTPVEEDLRRAPQLNHSNSDVVSINCNIRLVPNQEINFHLLGNLWLRSLKALKYKSMKIMVNAALQRQFHSPFIFREEDPSRQIVFEISKQEDWQVPIWIIVGSTLGGLLLLALLVLALWKLGFFRSARRRREPGLDPTPKVLE

SEQ ID NO: 159 - protein, 22 aa, Homo Sapiens
  SIGNAL (1)..(22)
MDLPRGLVVAWALSLWPGFTDT

SEQ ID NO: 160 - protein, 1141 aa, Homo Sapiens
  SIGNAL (1)..(22)
MDLPRGLVVAWALSLWPGFTDTFNMDTRKPRVIPGSRTAFFGYTVQQHDISGNKWLVVGAPLETNGYQKTGDVYKCPVIHGNCTKLNLGRVTLSNVSERKDNMRLGLSLATNPKDNSFLACSPLWSHECGSSYYTTGMCSRVNSNFRFSKTVAPALQRCQTYMDIVIVLDGSNSIYPWVEVQHFLINILKKFYIGPGQIQVGVVQYGEDVVHEFHLNDYRSVKDVVEAASHIEQRGGTETRTAFGIEFARSEAFQKGGRKGAKKVMIVITDGESHDSPDLEKVIQQSERDNVTRYAVAVLGYYNRRGINPETFLNEIKYIASDPDDKHFFNVTDEAALKDIVDALGDRIFSLEGTNKNETSFGLEMSQTGFSSHVVEDGVLLGAVGAYDWNGAVLKETSAGKVIPLRESYLKEFPEELKNHGAYLGYTVTSVVSSRQGRVYVAGAPRFNHTGKVILFTMHNNRSLTIHQAMRGQQIGSYFGSEITSVDIDGDGVTDVLLVGAPMYFNEGRERGKVYVYELRQNRFVYNGTLKDSHSYQNARFGSSIASVRDLNQDSYNDVVVGAPLEDNHAGAIYIFHGFRGSILKTPKQRITASELATGLQYFGCSIHGQLDLNEDGLIDLAVGALGNAVILWSRPVVQINASLHFEPSKINIFHRDCKRSGRDATCLAAFLCFTPIFLAPHFQTTTVGIRYNATMDERRYTPRAHLDEGGDRFTNRAVLLSSGQELCERINFHVLDTADYVKPVTFSVEYSLEDPDHGPMLDDGWPTTLRVSVPFWNGCNEDEHCVPDLVLDARSDLPTAMEYCQRVLRKPAQDCSAYTLSFDTTVFIIESTRQRVAVEATLENRGENAYSTVLNISQSANLQFASLIQKEDSDGSIECVNEERRLQKQVCNVSYPFFRAKAKVAFRLDFEFSKSIFLHHLEIELAAGSDSNERDSTKEDNVAPLRFHLKYEADVLFTRSSSLSHYEVKPNSSLERYDGIGPPFSCIFRIQNLGLFPIHGMMMKITIPIATRSGNRLLKLRDFLTDEANTSCNIWGNSTEYRPTPVEEDLRRAPQLNHSNSDVVSINCNIRLVPNQEINFHLLGNLWLRSLKALKYKSMKIMVNAALQRQFHSPFIFREEDPSRQIVFEISKQEDWQVP

SEQ ID NO: 161 - protein, 182 aa, Homo Sapiens
DIVIVLDGSNSIYPWVEVQHFLINILKKFYIGPGQIQVGVVQYGEDVVHEFHLNDYRSVKDVVEAASHIEQRGGTETRTAFGIEFARSEAFQKGGRKGAKKVMIVITDGESHDSPDLEKVIQQSERDNVTRYAVAVLGYYNRRGINPETFLNEIKYIASDPDDKHFFNVTDEAALKDIVDAL

SEQ ID NO: 162 - protein, 36 aa, Homo Sapiens
AFFGYTVQQHDISGNKWLVVGAPLETNGYQKTGDVY

SEQ ID NO: 163 - protein, 43 aa, Homo Sapiens
DNSFLACSPLWSHECGSSYYTTGMCSRVNSNFRFSKTVAPALQ

SEQ ID NO: 164 - protein, 26 aa, Homo Sapiens
SQTGFSSHVVEDGVLLGAVGAYDWNG

SEQ ID NO: 165 - protein, 35 aa, Homo Sapiens
HGAYLGYTVTSVVSSRQGRVYVAGAPRFNHTGKVI

SEQ ID NO: 166 - protein, 39 aa, Homo Sapiens
SYFGSEITSVDIDGDGVTDVLLVGAPMYFNEGRERGKVY

SEQ ID NO: 167 - protein, 36 aa, Homo Sapiens
ARFGSSIASVRDLNQDSYNDVVVGAPLEDNHAGAIY

SEQ ID NO: 168 - protein, 39 aa, Homo Sapiens
QYFGCSIHGQLDLNEDGLIDLAVGALGNAVILWSRPVVQ

SEQ ID NO: 169 - protein, 23 aa, Homo Sapiens
IWIIVGSTLGGLLLLALLVLALW

SEQ ID NO: 170 - protein, 24 aa, Homo Sapiens
KLGFFRSARRRREPGLDPTPKVLE

SEQ ID NO: 171 - DNA, 3884 bp, Homo Sapiens
  CDS (22)..(3522)
caggtcagaaaccgatcaggcatggaactccccttcgtcactcacctgttcttgcccctggtgttcctgacaggtctctgctccccctttaacctggatgaacatcacccacgcctattcccagggccaccagaagctgaatttggatacagtgtcttacaacatgttgggggtggacagcgatggatgctggtgggcgccccctgggatgggccttcaggcgaccggaggggggacgtttatcgctgccctgtagggggggcccacaatgccccatgtgccaagggccacttaggtgactaccaactgggaaattcatctcatcctgctgtgaatatgcacctggggatgtctctgttagagacagatggtgatgggggattcatggcctgtgcccctctctggtctcgtgcttgtggcagctctgtcttcagttctgggatatgtgcccgtgtggatgcttcattccagcctcagggaagcctggcacccactgcccaacgctgcccaacatacatggatgttgtcattgtcttggatggctccaacagcatctacccctggtctgaagttcagaccttcctacgaagactggtagggaaactgtttattgacccagaacagatacaggtgggactggtacagtatggggagagccctgtacatgagtggtccctgggagatttccgaacgaaggaagaagtggtgagagcagcaaagaacctcagtcggcgggagggacgagaaacaaagactgcccaagcaataatggtggcctgcacagaagggttcagtcagtcccatgggggccgacccgaggctgccaggctactggtggttgtcactgatggagagtcccatgatggagaggagcttcctgcagcactaaaggcctgtgaggctggaagagtgacacgctatgggattgcagtccttggtcactacctccggcggcagcgagatcccagctctttcctgagagaaattagaactattgccagtgatccagatgagcgattcttcttcaatgtcacagatgaggctgctctgactgacattgtggatgcactaggagatcggatttttggccttgaagggtcccatgcagaaaacgaaagctcctttgggctggaaatgtctcagattggtttctccactcatcggctaaaggatgggattctttttgggatggtgggggcctatgactggggaggctctgtgctatggcttgaaggaggccaccgccttttccccccacgaatggcactggaagacgagttcccccctgcactgcagaaccatgcagcctacctgggttactctgtttcttccatgcttttgcggggtggacgccgcctgtttctctctggggctcctcgatttagacatcgaggaaaagtcatcgccttccagcttaagaaagatggggctgtgagggttgcccagagcctccagggggagcagattggttcatactttggcagtgagctctgcccattggatacagatagggatggaacaactgatgtcttacttgtggctgcccccatgttcctgggaccccagaacaaggaaacaggacgtgtttatgtgtatctggtaggccagcagtccttgctgaccctccaaggaacacttcagccagaacccccccaggatgctcggtttggctttgccatgggagctcttcctgatctgaaccaagatggttttgctgatgtggctgtgggggcgcctctggaagatgggcaccagggagcactgtacctgtaccatggaacccagagtggagtcaggccccatcctgcccagaggattgctgctgcctccatgccacatgccctcagctactttggccgaagtgtggatggtcggctagatctggatggagatgatctggtcgatgtggctgtgggtgcccagggggcagccatcctgctcagctcccggcccattgtccatctgaccccatcactggaggtgaccccacaggccatcagtgtggttcagagggactgtaggcggcgaggccaagaagcagtctgtctgactgcagccctttgcttccaagtgacctcccgtactcctggtcgctgggatcaccaattctacatgaggttcaccgcatcactggatgaatggactgctggggcacgtgcagcatttgatggctctggccagaggttgtcccctcggaggctccggctcagtgtggggaatgtcacttgtgagcagctacacttccatgtgctggatacatcagattacctccggccagtggccttgactgtgacctttgccttggacaatactacaaagccagggcctgtgctgaatgagggctcacccacctctatacaaaagctggtccccttctcaaaggattgtggccctgacaatgaatgtgtcacagacctggtgcttcaagtgaatatggacatcagaggctccaggaaggccccatttgtggttcgaggtggccggcggaaagtgctggtatctacaactctggagaacagaaaggaaaatgcttacaatacgagcctgagtatcatcttctctagaaacctccacctggccagtctcactcctcagagagagagcccaataaaggtggaatgtgccgccccttctgctcatgcccggctctgcagtgtggggcatcctgtcttccagactggagccaaggtgacctttctgctagagtttgagtttagctgctcctctctcctgagccaggtctttgggaagctgactgccagcagtgacagcctggagagaaatggcacccttcaagaaaacacagcccagacctcagcctacatccaatatgagccccacctcctgttctctagtgagtctaccctgcaccgctatgaggttcacccatatgggaccctcccagtgggtcctggcccagaattcaaaaccactctcagggttcagaacctaggctgctatgtggtcagtggcctcatcatctcagccctccttccagctgtggcccatgggggcaattacttcctatcactgtctcaagtcatcactaacaatgcaagctgcatagtgcagaacctgactgaacccccaggcccacctgtgcatccagaggagcttcaacacacaaacagactgaatgggagcaatactcagtgtcaggtggtgaggtgccaccttgggcagctggcaaaggggactgaggtctctgttggactattgaggctggttcacaatgaatttttccgaagagccaagttcaagtccctgacggtggtcagcacctttgagctgggaaccgaagagggcagtgtcctacagctgactgaagcctcccgttggagtgagagcctcttggaggtggttcagacccggcctatcctcatctccctgtggatcctcataggcagtgtcctgggagggttgctcctgcttgctctccttgtcttctgcctgtggaagcttggcttctttgcccataagaaaatccctgaggaagaaaaaagagaagagaagttggagcaatgaatgtagaataagggtctagaaagtcctccctggcagctttcttcaagagacttgcataaaagcagaggtttgggggctcagatgggacaagaagccgcctctggactatctccccagaccagcagcctgacttgacttttgagtcctagggatgctgctggctagagatgaggctttacctcagacaagaagagctggcaccaaaactagccatgctcccaccctctgcttccctcctcctcgtgatcctggttccatagccaacactggggcttttgtttggggtccttttatccccaggaatcaataatttttttgcctaggaaaaaaaaaagcggccgcgaattcgatatcaagct

SEQ ID NO: 172 - protein, 1167 aa, Homo Sapiens
MELPFVTHLFLPLVFLTGLCSPFNLDEHHPRLFPGPPEAEFGYSVLQHVGGGQRWMLVGAPWDGPSGDRRGDVYRCPVGGAHNAPCAKGHLGDYQLGNSSHPAVNMHLGMSLLETDGDGGFMACAPLWSRACGSSVFSSGICARVDASFQPQGSLAPTAQRCPTYMDVVIVLDGSNSIYPWSEVQTFLRRLVGKLFIDPEQIQVGLVQYGESPVHEWSLGDFRTKEEVVRAAKNLSRREGRETKTAQAIMVACTEGFSQSHGGRPEAARLLVVVTDGESHDGEELPAALKACEAGRVTRYGIAVLGHYLRRQRDPSSFLREIRTIASDPDERFFFNVTDEAALTDIVDALGDRIFGLEGSHAENESSFGLEMSQIGFSTHRLKDGILFGMVGAYDWGGSVLWLEGGHRLFPPRMALEDEFPPALQNHAAYLGYSVSSMLLRGGRRLFLSGAPRFRHRGKVIAFQLKKDGAVRVAQSLQGEQIGSYFGSELCPLDTDRDGTTDVLLVAAPMFLGPQNKETGRVYVYLVGQQSLLTLQGTLQPEPPQDARFGFAMGALPDLNQDGFADVAVGAPLEDGHQGALYLYHGTQSGVRPHPAQRIAAASMPHALSYFGRSVDGRLDLDGDDLVDVAVGAQGAAILLSSRPIVHLTPSLEVTPQAISVVQRDCRRRGQEAVCLTAALCFQVTSRTPGRWDHQFYMRFTASLDEWTAGARAAFDGSGQRLSPRRLRLSVGNVTCEQLHFHVLDTSDYLRPVALTVTFALDNTTKPGPVLNEGSPTSIQKLVPFSKDCGPDNECVTDLVLQVNMDIRGSRKAPFVVRGGRRKVLVSTTLENRKENAYNTSLSIIFSRNLHLASLTPQRESPIKVECAAPSAHARLCSVGHPVFQTGAKVTFLLEFEFSCSSLLSQVFGKLTASSDSLERNGTLQENTAQTSAYIQYEPHLLFSSESTLHRYEVHPYGTLPVGPGPEFKTTLRVQNLGCYVVSGLIISALLPAVAHGGNYFLSLSQVITNNASCIVQNLTEPPGPPVHPEELQHTNRLNGSNTQCQVVRCHLGQLAKGTEVSVGLLRLVHNEFFRRAKFKSLTVVSTFELGTEEGSVLQLTEASRWSESLLEVVQTRPILISLWILIGSVLGGLLLLALLVFCLWKLGFFAHKKIPEEEKREEKLEQ

SEQ ID NO: 173 - DNA, 4858 bp, Mus Musculus
  CDS (28)..(3591)
gcgacacccgccgccgcgcagcgggccatggactttcccaggggcctcctggtggcctggaccctcagcctttggccaggattcacggacaccttcaatatggataccagaaatccccgggtcattgctggtcccagtgctgccttctttggctacacagtacagcagcatgatatcagtggcaagaagtggttggttgtgggtgccccaatggaaaccaatggccatcagaagacaggagacgtatacaaatgtccggtaacccagggcaactgcaccaagctcaacctgggcagggtcactctgtccaatgtgtctgagaggaaggacaacatgcgcctcggcctgagccttgccaccaaccccaaggacaacagcttcctggcctgcagccctctctggtcgcacgagtgtggaagctcctactacaccactggcatgtgctcacgggtcaactccaacttcagattctctaagacggtagctccggcacttcagaggtgccagacttacatggacatcgtcattgtcttagatggctccaacagcatctacccctgggtggaggtccaacacttcctcatcaatatcctcaaaaagttctacattggccccggccagatccaggtcggaatagtccagtatggagaagatgccgtccatgagttccaccttaatgactacaggtctgtaaaagatgtggtggaagccgccagccacattgagcagagaggagggacagagacccgcacggcatttggcattgaatttgcacgctcggaggctttccagaagggtggaagaaaaggggccaagaaagtgatgattgtcatcacggacggggaatcccacgacagcccagacctggagaaggtgatccggcagagcgagaaggacaacgtgaccagatacgctgtggccgttttgggctactacaaccgcagggggatcaatccagagacttttctaaatgaaatcaaatacatcgccagcgaccctgacgacaagcacttcttcaacgtcacagatgaggcggccctgaaggacattgttgatgcccttggggacaggatcttcagcttggaaggcaccaacaagaatgagacctcttttgggctggagatgtcgcagactggcttttcttcacatgtggtagaggatgggatcctgctgggagctgtgggagcctatgactggaacggggcggtgctgaaggagacaagtgctggcaaggtgattcctcaccgagagtcctaccttaaggagtttccagaggagctgaagaaccatgcagcatacctagggtacacggtgacgtcggttgtgtcctccaggcaggggcgggtgtatgtggctggagcccccagattcaaccatactggcaaggtcattctattcagcatgcacaacaaccggagcctcaccatccaccaggctcttcggggcgagcagataggctcctactttgggagtgagattacctcagtggacgtcaatgatgacagagtgacagatgtgctgctggtgggtgcacccatgtacttcagcgagggccgagagcgaggcaaggtgtatgtctacaacctgagacagaaccggtttgtttataatggcactctgaaggattcccacagctaccagaacgcccggttcgggtcctgcatcgcctctgttcaagacctcaaccaagattcctacaatgatgtggtggtgggggcccctctggaggacagccacagaggggccatctacatcttccatggcttccaaaccaatatcctgaagaagcccatgcagagaataacagcctcggagctggctcctggcctgcagcattttggctgcagcatccacggacaactggacctcaatgaggatgggcttgtggacctagcagtgggcgccctgggcaacgctgtggttttgtgggcccgccctgtagttcaaatcaacgccagcctccactttgagccttccaagatcaacatcttccacaaggactgcaagcgcaatggcagggatgccacctgcctggccgccttcctctgcttcatacccatcttcctggcaccccacttccaaacagcaaccgtcggcatcaggtacaatgcaaccatggatgagaggcggtatatgccgcgggcacatctggacgagggcggagaccagttcaccaacagagccgtcctgctctcctctggccaggaacactgtcaaaggatcaacttccatgtcctggacactgcagactacgtgaagccagtggccttctccgtggagtactccctagaggaccctgacaacggccccatgctggacaacggctggcccactacgctcagagtgtcggtgcccttctggaatggctgtaatgaggatgaacactgtgtccctgaccttgtactggatgctcggagtgacctgcccactgccatggagtactgccagcgggtgctggggaggccggcgcaggactgctccagctacaccctgtccttcgacaccactgtcttcatcatagagagcacgcgccgccgggtggcagtggaggccacgctggagaacagaggagagaatgcttacagcgccgtcctcaacatctcccagtcagagaaccttcagtttgccagcctgatccagaaggatgactcagacaacagcatcgagtgtgtgaacgaggagaggcggcttcacaagaaagtctgcaacgtcagctaccccttcttcagagccaaggccaaggtggctttccgtctggatttcgagttcagcaagtctgtgtttctgcaccatcttcagatccatctgggtgccggcagtgacagtcacgagcaagacagcaccgcagacgataacacggccctcctgcgcttccacctcaaatatgaagcagacgtcctctttaccagaagcagcagcctgagccacttcgaggtcaaggcaaacagctcacttgagagctatgatggcatcggacctccgttcaactgtgttttcaaggtgcagaacctgggctttttccccatccacggggtgatgatgaagatcactgtgcccatcgccaccaggggtggcaaccgcctgctgatgttgagggacttcttcaccgaccagggcaacacatcctgtaacatctgggggaacagcacagagtacaggagtaccccaactgaggaagatctgagccatgccccacagaggaatcacagcaactccgacgtggtctccatcatctgcaacctgaggctggcccccagccaggagaccagcttctacctggtgggaaacctgtggctgacatctctgaaagcactcaagtacaggtctctgaagatcacagtcaacgccgccttgcagaggcagttccacagccccttcatcttccgagaggaagaccctagccgccaggtcacatttgagatctccaagcaagaagactggcaggtccccatctggatcatcgtgggcagcactctggggggcctcttgctgctggccctgctggtcctggcactgtggaagctcggtttttttaaaagtgccaagcgcaagagggaacctggcctaggccccatccccaaagagctcaagtgaggatccagaggaagcttcaagttgttgggggcccgacaccagtccgggggtgtgcaggcccgggctatggcctcagagctggagcaaagaggacacccatggactttacattgagttcatctctggagcaatggcaactgatcgctgtgggatggacctccagcccgtgttcggagtgacttctctactagaggccaagacctccagtacagatccctaaggactaaaagggaccctccaagacccaccggtggccttcccccaaggctctgtggagggaatctgctgccccaaacactaaggtgctagggttttgttgtcttgcccacctctgaagaaactcaaggggaagctagcaaatacgagcccactgtgcacgccctatctggacctatagcttcaggactccatggcccgggagcataacctccgccgcaccccttacccttgctcttggttcccaaaccacagccatcccttctccacagatagaccccaaagatctctatgagtgacccagagttgtgtggcttgatatgccagctgcaggccagtgatggaaacacatccagggactgtgccaaatgaactggagggaatcaggatgctgggtaccttccaaacatcagaaagcagcagggctctccagcagtaaccaccacccactcaatcctgctctccagcctcccccgcagctcctctcagccgctttggttgctaggcaactcgtgctagggagcctgaggaggatgataaaaatccgtggctctccgtaccctcttgtctgacaactgcagcttgtccctggtagatgcactgtgatagggagcctctgtttcttacatcagcacctacacacacacacacacacacacacacacacacacacacacacacacacacgcacgcacctcccaaccatcagcgtgtgggagaagggctcctgtagggggcgctgtggggggccttctaggcatgcactgaacaaagcccatgcaaggcccctgggaaccttaaacctcagaggcagataggcatctcgccggccagctctgggataagccccaaggacaaggggcatgccggatgcccagcagagtaatttatgccttaaccttttgttgagatggaaatggacacatcagtgtcccctgtcatctgtttcatctgaacaatgtcatctgttcccctatgcggtacgacctttactgtcagaaatatatttaagaaaatgttctaaaaaaaaaaaaaaaagggcggccgc

SEQ ID NO: 174 - protein, 1188 aa, Mus Musculus
MDFPRGLLVAWTLSLWPGFTDTFNMDTRNPRVIAGPSAAFFGYTVQQHDISGKKWLVVGAPMETNGHQKTGDVYKCPVTQGNCTKLNLGRVTLSNVSERKDNMRLGLSLATNPKDNSFLACSPLWSHECGSSYYTTGMCSRVNSNFRFSKTVAPALQRCQTYMDIVIVLDGSNSIYPWVEVQHFLINILKKFYIGPGQIQVGIVQYGEDAVHEFHLNDYRSVKDVVEAASHIEQRGGTETRTAFGIEFARSEAFQKGGRKGAKKVMIVITDGESHDSPDLEKVIRQSEKDNVTRYAVAVLGYYNRRGINPETFLNEIKYIASDPDDKHFFNVTDEAALKDIVDALGDRIFSLEGTNKNETSFGLEMSQTGFSSHVVEDGILLGAVGAYDWNGAVLKETSAGKVIPHRESYLKEFPEELKNHAAYLGYTVTSVVSSRQGRVYVAGAPRFNHTGKVILFSMHNNRSLTIHQALRGEQIGSYFGSEITSVDVNDDRVTDVLLVGAPMYFSEGRERGKVYVYNLRQNRFVYNGTLKDSHSYQNARFGSCIASVQDLNQDSYNDVVVGAPLEDSHRGAIYIFHGFQTNILKKPMQRITASELAPGLQHFGCSIHGQLDLNEDGLVDLAVGALGNAVVLWARPVVQINASLHFEPSKINIFHKDCKRNGRDATCLAAFLCFIPIFLAPHFQTATVGIRYNATMDERRYMPRAHLDEGGDQFTNRAVLLSSGQEHCQRINFHVLDTADYVKPVAFSVEYSLEDPDNGPMLDNGWPTTLRVSVPFWNGCNEDEHCVPDLVLDARSDLPTAMEYCQRVLGRPAQDCSSYTLSFDTTVFIIESTRRRVAVEATLENRGENAYSAVLNISQSENLQFASLIQKDDSDNSIECVNEERRLHKKVCNVSYPFFRAKAKVAFRLDFEFSKSVFLHHLQIHLGAGSDSHEQDSTADDNTALLRFHLKYEADVLFTRSSSLSHFEVKANSSLESYDGIGPPFNCVFKVQNLGFFPIHGVMMKITVPIATRGGNRLLMLRDFFTDQGNTSCNIWGNSTEYRSTPTEEDLSHAPQRNHSNSDVVSIICNLRLAPSQETSFYLVGNLWLTSLKALKYRSLKITVNAALQRQFHSPFIFREEDPSRQVTFEISKQEDWQVPIWIIVGSTLGGLLLLALLVLALWKLGFFKSAKRKREPGLGPIPKELK

SEQ ID NO: 175 - DNA, 3564 bp, Mus Musculus
  CDS (1)..(3564)
atggactttcccaggggcctcctggtggcctggaccctcagcctttggccaggattcacggacaccttcaatatggataccagaaatccccgggtcattgctggtcccagtgctgccttctttggctacacagtacagcagcatgatatcagtggcaagaagtggttggttgtgggtgccccaatggaaaccaatggccatcagaagacaggagacgtatacaaatgtccggtaacccagggcaactgcaccaagctcaacctgggcagggtcactctgtccaatgtgtctgagaggaaggacaacatgcgcctcggcctgagccttgccaccaaccccaaggacaacagcttcctggcctgcagccctctctggtcgcacgagtgtggaagctcctactacaccactggcatgtgctcacgggtcaactccaacttcagattctctaagacggtagctccggcacttcagaggtgccagacttacatggacatcgtcattgtcttagatggctccaacagcatctacccctgggtggaggtccaacacttcctcatcaatatcctcaaaaagttctacattggccccggccagatccaggtcggaatagtccagtatggagaagatgccgtccatgagttccaccttaatgactacaggtctgtaaaagatgtggtggaagccgccagccacattgagcagagaggagggacagagacccgcacggcatttggcattgaatttgcacgctcggaggctttccagaagggtggaagaaaaggggccaagaaagtgatgattgtcatcacggacggggaatcccacgacagcccagacctggagaaggtgatccggcagagcgagaaggacaacgtgaccagatacgctgtggccgttttgggctactacaaccgcagggggatcaatccagagacttttctaaatgaaatcaaatacatcgccagcgaccctgacgacaagcacttcttcaacgtcacagatgaggcggccctgaaggacattgttgatgcccttggggacaggatcttcagcttggaaggcaccaacaagaatgagacctcttttgggctggagatgtcgcagactggcttttcttcacatgtggtagaggatgggatcctgctgggagctgtgggagcctatgactggaacggggcggtgctgaaggagacaagtgctggcaaggtgattcctcaccgagagtcctaccttaaggagtttccagaggagctgaagaaccatgcagcatacctagggtacacggtgacgtcggttgtgtcctccaggcaggggcgggtgtatgtggctggagcccccagattcaaccatactggcaaggtcattctattcagcatgcacaacaaccggagcctcaccatccaccaggctcttcggggcgagcagataggctcctactttgggagtgagattacctcagtggacgtcaatgatgacagagtgacagatgtgctgctggtgggtgcacccatgtacttcagcgagggccgagagcgaggcaaggtgtatgtctacaacctgagacagaaccggtttgtttataatggcactctgaaggattcccacagctaccagaacgcccggttcgggtcctgcatcgcctctgttcaagacctcaaccaagattcctacaatgatgtggtggtgggggcccctctggaggacagccacagaggggccatctacatcttccatggcttccaaaccaatatcctgaagaagcccatgcagagaataacagcctcggagctggctcctggcctgcagcattttggctgcagcatccacggacaactggacctcaatgaggatgggcttgtggacctagcagtgggcgccctgggcaacgctgtggttttgtgggcccgccctgtagttcaaatcaacgccagcctccactttgagccttccaagatcaacatcttccacaaggactgcaagcgcaatggcagggatgccacctgcctggccgccttcctctgcttcatacccatcttcctggcaccccacttccaaacagcaaccgtcggcatcaggtacaatgcaaccatggatgagaggcggtatatgccgcgggcacatctggacgagggcggagaccagttcaccaacagagccgtcctgctctcctctggccaggaacactgtcaaaggatcaacttccatgtcctggacactgcagactacgtgaagccagtggccttctccgtggagtactccctagaggaccctgacaacggccccatgctggacaacggctggcccactacgctcagagtgtcggtgcccttctggaatggctgtaatgaggatgaacactgtgtccctgaccttgtactggatgctcggagtgacctgcccactgccatggagtactgccagcgggtgctggggaggccggcgcaggactgctccagctacaccctgtccttcgacaccactgtcttcatcatagagagcacgcgccgccgggtggcagtggaggccacgctggagaacagaggagagaatgcttacagcgccgtcctcaacatctcccagtcagagaaccttcagtttgccagcctgatccagaaggatgactcagacaacagcatcgagtgtgtgaacgaggagaggcggcttcacaagaaagtctgcaacgtcagctaccccttcttcagagccaaggccaaggtggctttccgtctggatttcgagttcagcaagtctgtgtttctgcaccatcttcagatccatctgggtgccggcagtgacagtcacgagcaagacagcaccgcagacgataacacggccctcctgcgcttccacctcaaatatgaagcagacgtcctctttaccagaagcagcagcctgagccacttcgaggtcaaggcaaacagctcacttgagagctatgatggcatcggacctccgttcaactgtgttttcaaggtgcagaacctgggctttttccccatccacggggtgatgatgaagatcactgtgcccatcgccaccaggggtggcaaccgcctgctgatgttgagggacttcttcaccgaccagggcaacacatcctgtaacatctgggggaacagcacagagtacaggagtaccccaactgaggaagatctgagccatgccccacagaggaatcacagcaactccgacgtggtctccatcatctgcaacctgaggctggcccccagccaggagaccagcttctacctggtgggaaacctgtggctgacatctctgaaagcactcaagtacaggtctctgaagatcacagtcaacgccgccttgcagaggcagttccacagccccttcatcttccgagaggaagaccctagccgccaggtcacatttgagatctccaagcaagaagactggcaggtccccatctggatcatcgtgggcagcactctggggggcctcttgctgctggccctgctggtcctggcactgtggaagctcggtttttttaaaagtgccaagcgcaagagggaacctggcctaggccccatccccaaagagctcaag

SEQ ID NO: 176 - protein, 1188 aa, Mus Musculus; identical to SEQ ID NO: 174

SEQ ID NO: 177 - protein, 1166 aa, Mus Musculus
FNMDTRNPRVIAGPSAAFFGYTVQQHDISGKKWLVVGAPMETNGHQKTGDVYKCPVTQGNCTKLNLGRVTLSNVSERKDNMRLGLSLATNPKDNSFLACSPLWSHECGSSYYTTGMCSRVNSNFRFSKTVAPALQRCQTYMDIVIVLDGSNSIYPWVEVQHFLINILKKFYIGPGQIQVGIVQYGEDAVHEFHLNDYRSVKDVVEAASHIEQRGGTETRTAFGIEFARSEAFQKGGRKGAKKVMIVITDGESHDSPDLEKVIRQSEKDNVTRYAVAVLGYYNRRGINPETFLNEIKYIASDPDDKHFFNVTDEAALKDIVDALGDRIFSLEGTNKNETSFGLEMSQTGFSSHVVEDGILLGAVGAYDWNGAVLKETSAGKVIPHRESYLKEFPEELKNHAAYLGYTVTSVVSSRQGRVYVAGAPRFNHTGKVILFSMHNNRSLTIHQALRGEQIGSYFGSEITSVDVNDDRVTDVLLVGAPMYFSEGRERGKVYVYNLRQNRFVYNGTLKDSHSYQNARFGSCIASVQDLNQDSYNDVVVGAPLEDSHRGAIYIFHGFQTNILKKPMQRITASELAPGLQHFGCSIHGQLDLNEDGLVDLAVGALGNAVVLWARPVVQINASLHFEPSKINIFHKDCKRNGRDATCLAAFLCFIPIFLAPHFQTATVGIRYNATMDERRYMPRAHLDEGGDQFTNRAVLLSSGQEHCQRINFHVLDTADYVKPVAFSVEYSLEDPDNGPMLDNGWPTTLRVSVPFWNGCNEDEHCVPDLVLDARSDLPTAMEYCQRVLGRPAQDCSSYTLSFDTTVFIIESTRRRVAVEATLENRGENAYSAVLNISQSENLQFASLIQKDDSDNSIECVNEERRLHKKVCNVSYPFFRAKAKVAFRLDFEFSKSVFLHHLQIHLGAGSDSHEQDSTADDNTALLRFHLKYEADVLFTRSSSLSHFEVKANSSLESYDGIGPPFNCVFKVQNLGFFPIHGVMMKITVPIATRGGNRLLMLRDFFTDQGNTSCNIWGNSTEYRSTPTEEDLSHAPQRNHSNSDVVSIICNLRLAPSQETSFYLVGNLWLTSLKALKYRSLKITVNAALQRQFHSPFIFREEDPSRQVTFEISKQEDWQVPIWIIVGSTLGGLLLLALLVLALWKLGFFKSAKRKREPGLGPIPKELK

SEQ ID NO: 178 - protein, 22 aa, Mus Musculus
  SIGNAL (1)..(22)
MDFPRGLLVAWTLSLWPGFTDT

SEQ ID NO: 179 - protein, 1141 aa, Mus Musculus
MDFPRGLLVAWTLSLWPGFTDTFNMDTRNPRVIAGPSAAFFGYTVQQHDISGKKWLVVGAPMETNGHQKTGDVYKCPVTQGNCTKLNLGRVTLSNVSERKDNMRLGLSLATNPKDNSFLACSPLWSHECGSSYYTTGMCSRVNSNFRFSKTVAPALQRCQTYMDIVIVLDGSNSIYPWVEVQHFLINILKKFYIGPGQIQVGIVQYGEDAVHEFHLNDYRSVKDVVEAASHIEQRGGTETRTAFGIEFARSEAFQKGGRKGAKKVMIVITDGESHDSPDLEKVIRQSEKDNVTRYAVAVLGYYNRRGINPETFLNEIKYIASDPDDKHFFNVTDEAALKDIVDALGDRIFSLEGTNKNETSFGLEMSQTGFSSHVVEDGILLGAVGAYDWNGAVLKETSAGKVIPHRESYLKEFPEELKNHAAYLGYTVTSVVSSRQGRVYVAGAPRFNHTGKVILFSMHNNRSLTIHQALRGEQIGSYFGSEITSVDVNDDRVTDVLLVGAPMYFSEGRERGKVYVYNLRQNRFVYNGTLKDSHSYQNARFGSCIASVQDLNQDSYNDVVVGAPLEDSHRGAIYIFHGFQTNILKKPMQRITASELAPGLQHFGCSIHGQLDLNEDGLVDLAVGALGNAVVLWARPVVQINASLHFEPSKINIFHKDCKRNGRDATCLAAFLCFIPIFLAPHFQTATVGIRYNATMDERRYMPRAHLDEGGDQFTNRAVLLSSGQEHCQRINFHVLDTADYVKPVAFSVEYSLEDPDNGPMLDNGWPTTLRVSVPFWNGCNEDEHCVPDLVLDARSDLPTAMEYCQRVLGRPAQDCSSYTLSFDTTVFIIESTRRRVAVEATLENRGENAYSAVLNISQSENLQFASLIQKDDSDNSIECVNEERRLHKKVCNVSYPFFRAKAKVAFRLDFEFSKSVFLHHLQIHLGAGSDSHEQDSTADDNTALLRFHLKYEADVLFTRSSSLSHFEVKANSSLESYDGIGPPFNCVFKVQNLGFFPIHGVMMKITVPIATRGGNRLLMLRDFFTDQGNTSCNIWGNSTEYRSTPTEEDLSHAPQRNHSNSDVVSIICNLRLAPSQETSFYLVGNLWLTSLKALKYRSLKITVNAALQRQFHSPFIFREEDPSRQVTFEISKQEDWQVP

SEQ ID NO: 180 - protein, 182 aa, Mus Musculus
DIVIVLDGSNSIYPWVEVQHFLINILKKFYIGPGQIQVGIVQYGEDAVHEFHLNDYRSVKDVVEAASHIEQRGGTETRTAFGIEFARSEAFQKGGRKGAKKVMIVITDGESHDSPDLEKVIRQSEKDNVTRYAVAVLGYYNRRGINPETFLNEIKYIASDPDDKHFFNVTDEAALKDIVDAL

SEQ ID NO: 181 - protein, 36 aa, Mus Musculus
AFFGYTVQQHDISGKKWLVVGAPMETNGHQKTGDVY

SEQ ID NO: 182 - protein, 43 aa, Mus Musculus; identical to SEQ ID NO: 163

SEQ ID NO: 183 - protein, 26 aa, Mus Musculus
SQTGFSSHVVEDGILLGAVGAYDWNG

SEQ ID NO: 184 - protein, 35 aa, Mus Musculus
HAAYLGYTVTSVVSSRQGRVYVAGAPRFNHTGKVI

SEQ ID NO: 185 - protein, 39 aa, Mus Musculus
SYFGSEITSVDVNDDRVTDVLLVGAPMYFSEGRERGKVY

SEQ ID NO: 186 - protein, 36 aa, Mus Musculus
ARFGSCIASVQDLNQDSYNDVVVGAPLEDSHRGAIY

SEQ ID NO: 187 - protein, 39 aa, Mus Musculus
QHFGCSIHGQLDLNEDGLVDLAVGALGNAVVLWARPVVQ

SEQ ID NO: 188 - protein, 23 aa, Mus Musculus
IWIIVGSTLGGLLLLALLVLALW

SEQ ID NO: 189 - protein, 24 aa, Mus Musculus
KLGFFKSAKRKREPGLGPIPKELK

SEQ ID NO: 190 - protein, 56 aa, Homo Sapiens
PGSYFGYSVAGVGDLNGDKSGYPDLLLVGAPRGAVYVYFGSSNSGGGRCIPLQNLS

SEQ ID NO: 191 - protein, 54 aa, Homo Sapiens
RTAFFGYTVQQHDISGNKWLVVGAPLETNGYQKTGDVYKCPVIHGNCTKLNLGR

SEQ ID NO: 192 - protein, 51 aa, Homo Sapiens
HGAYLGYTVTSVSSRQGRVYVAGAPRFNHTGKVILFTMHNNRSLTIHQAMR

SEQ ID NO: 193 - protein, 57 aa, Homo Sapiens
IGSYFGSEITSVDIDGDGVTDVLLVGAPMYFNEGRERGKVYVYELRQNRFVYNGTLK

SEQ ID NO: 194 - protein, 56 aa, Homo Sapiens
QNARFGSSIASVRDLNQDSYNDVVVGAPLEDNHAGAIYIFHGFRGSILKTPKQRIT

SEQ ID NO: 195 - protein, 55 aa, Artificial Sequence
  Markov Model Sequence
GLQYFGCSIHGQLDLNEDGLIDLAVGALGNAVILWSRPVVQINASLHFEPSKINI

SEQ ID NO: 196 - protein, 57 aa, Artificial Sequence
  CXC Signature Motif
  VARIANT (1)..(2): Xaa is any amino acid or is absent
  misc_feature (4)..(4): Xaa can be any naturally occurring amino acid
  VARIANT (6)..(25): Xaa is any amino acid
  VARIANT (26)..(29): Xaa is any amino acid or is absent
  VARIANT (31)..(47): Xaa is any amino acid
  VARIANT (48)..(54): Xaa is any amino acid or is absent
  VARIANT (56)..(57): Xaa is any amino acid or is absent
XXCXCXXXXXXXXXXXXXXXXXXXXXXXXCXXXXXXXXXXXXXXXXXXXXXXXXCXX

SEQ ID NO: 197 - protein, 54 aa, Artificial Sequence
  CXC Signature Motif
  VARIANT (1)..(2): Xaa is any amino acid or is absent
  misc_feature (4)..(4): Xaa can be any naturally occurring amino acid
  VARIANT (6)..(28): Xaa is any amino acid
  VARIANT (29)..(29): Xaa is any amino acid or is absent
  VARIANT (31)..(50): Xaa is any amino acid
  VARIANT (51)..(51): Xaa is any amino acid or is absent
  VARIANT (53)..(54): Xaa is any amino acid
XXCXCXXXXXXXXXXXXXXXXXXXXXXXXCXXXXXXXXXXXXXXXXXXXXXCXX

SEQ ID NO: 198 - protein, 53 aa, Artificial Sequence
  CXC Signature Motif
  VARIANT (1)..(2): Xaa is any amino acid or is absent
  misc_feature (4)..(4): Xaa can be any naturally occurring amino acid
  VARIANT (6)..(11): Xaa is any amino acid
  VARIANT (12)..(12): Xaa is any amino acid or is absent
  VARIANT (13)..(13): Xaa is Leu, Ile, Val, Met, Phe, or Tyr
  VARIANT (14)..(15): Xaa is any amino acid
  VARIANT (16)..(16): Xaa is Arg, Lys, Ser, Glu, or Gln
  misc_feature (17)..(17): Xaa can be any naturally occurring amino acid
  VARIANT (18)..(18): Xaa is Lue, Ile, Val, or Met
  VARIANT (19)..(20): Xaa is any amino acid
  VARIANT (21)..(21): Xaa is Leu, Ile, Val, or Met
  VARIANT (22)..(29): Xaa is any amino acid
  VARIANT (31)..(34): Xaa is any amino acid
  VARIANT (35)..(36): Xaa is Leu, Ile, Val, or Met
  VARIANT (37)..(49): Xaa is any amino acid
  VARIANT (50)..(50): Xaa is any amino acid or is absent
  VARIANT (52)..(52): Xaa is Leu, Trp, or Met
  misc_feature (53)..(53): Xaa can be any naturally occurring amino acid
XXCXCXXXXXXXXXXXXXXXXXXXXXXXXCXXXXXXXXXXXXXXXXXXXXCXX

SEQ ID NO: 199 - protein, 53 aa, Artificial Sequence
  CXC Signature Motif
  VARIANT (1)..(1): Xaa is any amino acid or is absent
  VARIANT (2)..(2): Xaa is Arg or Lys
  VARIANT (4)..(4): Xaa is Arg or Lys
  VARIANT (6)..(9): Xaa is any amino acid
  VARIANT (11)..(14): Xaa is any amino acid
  VARIANT (15)..(15): Xaa is any amino acid or is absent
  VARIANT (16)..(16): Xaa is Glu or Asp
  VARIANT (17)..(22): Xaa is any amino acid
  VARIANT (23)..(23): Xaa is Lys or Arg
  VARIANT (24)..(29): Xaa is any amino acid
  VARIANT (30)..(30): Xaa is Asp or Glu
  VARIANT (31)..(31): Xaa is Asp or Glu
  misc_feature (32)..(32): Xaa can be any naturally occurring amino acid
  VARIANT (33)..(36): Xaa is Leu, Ile, Val, Met, Phe, or Tyr
  VARIANT (37)..(48): Xaa is any amino acid
  VARIANT (49)..(49): Xaa is any amino acid or is absent
  VARIANT (52)..(52): Xaa is Leu, Ile, Val, or Met
XXCXCXXXXPXXXXXXXXXXXXXXXXXXCXXXXXXXXXXXXXXXXXXXXHCXH

SEQ ID NO: 200 - protein, 35 aa, Artificial Sequence
  Repeat Consensus Sequence
  VARIANT (3)..(12): Xaa is any amino acid
  VARIANT (13)..(32): Xaa is any amino acid or is absent
  VARIANT (33)..(33): Xaa is Gly or Ala
  VARIANT (35)..(35): Xaa is Pro, Leu, or Gln
FGXXXXXXXXXXXXXXXXXXXXXXXXXXXXXXXAX

SEQ ID NO: 201 - protein, 45 aa, Artificial Sequence
  Repeat Consensus Sequence
  VARIANT (1)..(1): Xaa is Gly or Ser
  VARIANT (2)..(2): Xaa is Phe or Tyr
  VARIANT (3)..(7): Xaa is any amino acid
  VARIANT (8)..(42): Xaa is any amino acid or is absent
  VARIANT (43)..(43): Xaa is Glu, Val, or Leu
  VARIANT (44)..(44): Xaa is Ala or Met
  VARIANT (45)..(45): Xaa is Pro or Tyr
XXXXXXXXXXXXXXXXXXXXXXXXXXXXXXXXXXXXXXXXXXXXX

SEQ ID NO: 202 - protein, 53 aa, Artificial Sequence
  I Domain Consensus Sequence
  misc_feature (4)..(4): Xaa can be any naturally occurring amino acid
  VARIANT (6)..(10): Xaa is any amino acid
  VARIANT (11)..(20): Xaa is any amino acid or is absent
  VARIANT (22)..(35): Xaa is any amino acid
  VARIANT (36)..(51): Xaa is any amino acid or is absent
DGSXSXXXXXXXXXXXXXXXFXXXXXXXXXXXXXXXXXXXXXXXXXXXXXXQY

SEQ ID NO: 203 - protein, 8 aa, Artificial Sequence
  A259 Cytoplasmic Domain Consensus Sequence
  VARIANT (1)..(1): Xaa = F, Y, W or S
  VARIANT (2)..(2): Xaa = R or K
  VARIANT (3)..(3): Xaa = 0-1 amino acids where each amino acid can be any amino acid
  VARIANT (7)..(7): Xaa = 0-1 amino acids where each amino acid can be any amino acid
XXXGFFXR

SEQ ID NO: 204 - DNA, 21 bp, Artificial Sequence
  Oligonucleotide
tgcaacttttacaggaaacac

SEQ ID NO: 205 - DNA, 21 bp, Artificial Sequence
  Oligonucleotide
cctcacttttacccgagactc

SEQ ID NO: 206 - DNA, 21 bp, Artificial Sequence
  Oligonucleotide
gacgggtggtacttaaaacaa

1-12. (canceled)

13. An isolated nucleic acid molecule selected from the group consisting of: a) a nucleic acid molecule comprising a nucleotide sequence which is at least 80% identical to the nucleotide sequence of SEQ ID NO: 1 or SEQ ID NO:3; b) a nucleic acid molecule comprising a fragment of at least 500 nucleotides of the nucleotide sequence of SEQ ID NO:1 or SEQ ID NO:3; c) a nucleic acid molecule which encodes a polypeptide comprising the amino acid sequence of SEQ ID NO:2; d) a nucleic acid molecule which encodes a fragment of a polypeptide comprising the amino acid sequence of SEQ ID NO:2, wherein the fragment comprises at least 100 contiguous amino acids of SEQ ID NO:2; and e) a nucleic acid molecule which encodes a naturally occurring allelic variant of a polypeptide comprising the amino acid sequence of SEQ ID NO:2, wherein the nucleic acid molecule hybridizes to a nucleic acid molecule comprising SEQ ID NO:1, 3, or a complement thereof, under stringent conditions.

14. The isolated nucleic acid molecule of claim 13, which is selected from the group consisting of: a) a nucleic acid comprising the nucleotide sequence of SEQ ID NO:1 or SEQ ID NO:3; and b) a nucleic acid molecule which encodes a polypeptide comprising the amino acid sequence of SEQ ID NO:2.

15. The nucleic acid molecule of claim 13 further comprising vector nucleic acid sequences.

16. A host cell which contains the nucleic acid molecule of claim 13.

17. An isolated polypeptide selected from the group consisting of: a) a polypeptide which is encoded by a nucleic acid molecule comprising a nucleotide sequence which is at least 80% identical to a nucleic acid comprising the nucleotide sequence of SEQ ID NO:1, SEQ ID NO:3, or a complement thereof; b) a naturally occurring allelic variant of a polypeptide comprising the amino acid sequence of SEQ ID NO:2, wherein the polypeptide is encoded by a nucleic acid molecule which hybridizes to a nucleic acid molecule comprising SEQ ID NO:1 or SEQ ID NO:3; and c) a fragment of a polypeptide comprising the amino acid sequence of SEQ ID NO:2, wherein the fragment comprises at least 100 contiguous amino acids of SEQ ID NO:2.

18. The isolated polypeptide of claim 17, comprising the amino acid sequence of SEQ ID NO:2.

19. The isolated polypeptide of claim 17 further comprising heterologous amino acid sequences.

20. A method for detecting the presence of a polypeptide of claim 17 in a sample, comprising: contacting the sample with a compound which selectively binds to a polypeptide of claim 17; and determining whether the compound binds to the polypeptide in the sample.

21. The method of claim 20, wherein the compound which binds to the polypeptide is an antibody.

22. A method for detecting the presence of a nucleic acid molecule of claim 13 in a sample, comprising the steps of: contacting the sample with a nucleic acid probe or primer which selectively hybridizes to the nucleic acid molecule; and determining whether the nucleic acid probe or primer binds to a nucleic acid molecule in the sample.

23. The method of claim 22, wherein the sample comprises mRNA molecules and is contacted with a nucleic acid probe.

24. A method for identifying a compound which binds to a polypeptide of claim 17 comprising the steps of: contacting a polypeptide, or a cell expressing a polypeptide of claim 17 with a test compound; and determining whether the polypeptide binds to the test compound.

25. A method for identifying a compound which modulates the activity of a polypeptide of claim 17, comprising: contacting a polypeptide of claim 17 with a test compound; and determining the effect of the test compound on the activity of the polypeptide to thereby identify a compound which modulates the activity of the polypeptide.

26. An isolated antibody, or portion thereof, that specifically binds to a polypeptide selected from the group consisting of: a) the polypeptide comprising the amino acid sequence of SEQ ID NO:2; b) the polypeptide encoded by the nucleic acid molecule of SEQ ID NO: 1 or 3; and c) the polypeptide encoded by the nucleotide sequence contained in the plasmid deposited with the ATCC as Accession number 98348.

27. The antibody, or portion thereof, of claim 26, wherein said antibody is selected from the group consisting of: i) a monoclonal antibody; ii) a polyclonal antibody; iii) a bispecific antibody; and iii) a chimeric antibody.

28. The antibody, or portion thereof, of claim 26, wherein said portion is a F(ab) fragment or a F(ab′)₂ fragment.

29. The antibody, or portion thereof, of claim 26, wherein said antibody binds to amino acid residues 18-529 of SEQ ID NO:2.

30. The antibody, or portion thereof, of claim 26, wherein said antibody is detectably labeled.

31. The antibody, or portion thereof, of claim 30, wherein the detectable label is selected from the group consisting of: a) an enzyme; b) a fluorescent material; c) a luminescent material; d) a bioluminescent material; and e) a radioactive material.
